United States Patent Application Publication US 2025/0195589 A1 - sequence listing, part 12

SEQ ID NO: 21 - DNA, 2465907 bp, Lactobacillus crispatus
  source 1..2465907: mol_type = genomic DNA
ttgttcgacattaataaattttgggaacactttaatgacgagatgcgtgctcgtttcaacgaagttgcctacaatgcatggttcaaaaatactaaacctatttcatataatggaaaaacacatgaattaaaaattttagttcaaaatcctgtttctaaaggttactgggaaaagaatctatcttctcaattgattcaatctgcctacggttatgccgacatcgagatcttacctgtatttaaaatatctgaagatgcggatattacagaaaggatcgtaacacctgcgccaaagcgtgatgcgcaagttcaacagcctaatttgccagaaaaagaattcactaaagacttgaagttaaacgaaaaatacacttttgataacttcgttcaaggtgagggaaacaagttggccgccggtgctgcacttgctgtagccgacagtcctggtagtttttacaatcctttatttatttttggtggcgttggtttaggtaaaacacacctgatgcaagctgttgggcatcaaatgctagcagagcgacctaacgcaaaagttgtctatatacagagtgaaacttttgttaatgacttcattaattccatcaaaaataaaacgcaggacaaattccgcgaaaaatacagaacttgtgacctgcttttagttgatgatattcaattttttgccaaaaaagaggggattcaagaggaattcttccatacttttgagacactttataacgatcaaaaacagatcgtaatgactagcgatcggttgcctacagaaatcccagatctatcagagcgtttagtttctcgatttacatggggcttgcaagtcgaaattacgcctcccgatttggaaaccagaatcgctattttgcgacgcaaagctgaaacagaaggtttgactatcgatgatggtacgcttaactatattgcatctcaagttgatactaacattagagaacttgaaggggctttagttaaagttcaagcttatgccacaattgaaaaagcagatattgacgttaaccttgcgcgtgaagcattagttgacctcaaattagttcaaaaaaatcgtggattacaaatctctaaaatacaggaggttgtcgcaaactatttccaaacttcaactgctgaattaaagggtaaaaagcgtgtacggcagattgtagttcctcggcaaatagcaatgtatctttctcgtgaattaacagatgccagtttgccaaaaattggtcaagaatttgggggaaaagatcataccactgtcatgcatgcttatgataaaatcgacaagcagatgaaacttgattctgatatcaaaactgctgtctttgacctaaagcaaattttggagcactaaaagttatccactgtggaaaaataaacaagttttacacaagtttttaaccgtaacaagtccgttattttaggcttcttatgagttttcaacagaactcacaggccctactactactaattaattatataattactaataaagagaaatcacacagctattcttgggaggaaaaacatgaaatttacaattaatcgcaatctgtttatcgaaaacctcaataatgtaatgcgggccatctcatcaagagctactattccaattcttagtggaattaagttagacttaacagaagataaacttacgttaacgggtagtgatacagatatttcaattgaaattcaaattccagtcaatgatgatttaaatgtggaatctacaggttctattgttttaccagctagattctttagtgaaatcgtaaaaaaattacctggtaaagacttctcatttgaagtaaaagaaagttttcaaactcagatcatatctgaaaatagtgaatttacaattaatggtttagatgctaataactatccacgtttaccagaaattccagatgctgcttcattcactatttctggtaaaactttccgtgaaatcattaatgaaacgcaatttgctacttccaatgatcaaacacgagcaattttaactggggtacgtttcttctttagtccagataaaattaaagctgtcgcaactgattcccaccgtttatctcaaagaacaattgctttagaaaacggacctcaagctgaaactgatttgattattcctggtaaaagtttgcaggaattagctagaatcattggtgaagctgatccagaagttaaagtttgcccaggtgataaccaagctttatttgtaattggcaacttgtccttctattcacgtcttttggacggaaattatccagacactgatcgcttgattccgactgaaaagaccactagtgttgaatttgacatttccgaattatctagtgcccttgaacgtgccagtttgttaactcatgctggccgtaacaacgtggttactttgactttggatatagaaaatcaatcagctaagttatcaggtaaatctgcggaaattggtaatgttgaagaagatgttagcttcagaaatcttgaaggaaacaatttagagatttccttcaaccctgactatatgcgtgatgcgttaagagcttcagtaacagattctgtaattatgagttttactaagccacttcgtccatttatcattaatccagataaagaagacattgaatttgtgcaattaattacgccagttagaacatattaatcaagtacacaatatttaggtcataaaaagtcgtcaaataaggcgactttttattttgcttttaaacgaaaacgcaaaatattggcgtatatttatttttttaccgtgctagtgtgattaggttattttgaaaaaaagctctgaaaaggcttataagagcgatttagtttgttatttgtgttgaaaactaatataattatataggtataaagcgtattgaaggtgagcattattaagtattttaaagttgacggcgatcatattactttggggcaatttctgaaggaagagagcattatttcatcaggtggacaagctaaatggtacttaaaagataatccagtaactttaaatggtgaacttgaagatcgaagaggcaaaaagatgcatgttggtgatcacgtagtggttaatggccaagaatatgagtttcggtagggaagtcaatgtatcttgatcattttactgtacagaattttcgtaatttaaaaaagcttgacgtaaattttgattcaaacgtcaatatttttattggcaaaaatgctcagggcaagaccaatttgctagaggcaatctattttttagcattaacacgttcacataggaccaataatgataaagatttaattggtttcggcggtgagtttaccaatttacttgggcatgtacataaaagccaagtggatcttgatttacgtgttttgatcacccaaaaaggtaaaaaagtatggattaatcgagttgagcaggcgaagttgtctaaatacgtaggtcagctgaatgcgattttattttcaccggaagacctcgagttgatcaagggtgcaccagcactgcggcggagatttatggatcaagaatttggtcaaataaatgcagagtatttatacttcgcaagtaagtatcggcaagttttaattcaaaagaataattatctgaagcagctagctaaaggtaaggcaaaggatcaggtctttttagatgtactttcagatcaactagctggtatcgccgctgaagttgtctttcgacgatttaaatttcttaagtatcttagtcactatgctagcgatgcttatgcacatattagtttgggcagtgagcagttttcaattgcttatcatccatcagtggctgacatccaagctgatgacagtacagaagaaatttatcaaaagattttagcaagttatgcacgaaataaggcaagtgaaattcgcaaggggacaactacttctgggccgcaccgtgatgatattgaatttaaacttgatggtcaaaatgcacatctttatgcttcgcaagggcagcagcgttcaattgcacttagcgtcaagctggcggaaattcaattggtgcatcaactaacagatgagtatcctttactcttgctggatgatgtaatgagcgagttagatcatggtcgacaaagtgcgctacttaattatattcatgggaaaacgcaaacctttattactacgactgacttagaggggatttcctgggaaataattaaaaagccgcgtgtgtatcacattcaatcaggcaaaattagtttggagaaggagaattaaatggctgataattcaaaagaaaatcttgaaaaggtcaaaaaatatgaaaaagaggctgacaagtataatgccagtcaaattcaggttcttggcggtctagaagctgtacgtaagcggccaggtatgtatatcggttcgactagttctcagggattgcaccacttagtgtgggaaattattgataacagtattgatgaacgacttgctggttttgcgaccaagattgaagttacgattaacgaagatggtagtgtcaccgttcaagatgatggacgtgggattcctgtagatattcaagaaaaaacaggtcgtcctgcattagagactgtatttactgtacttcacgccggtggtaaattcggcggtggtggatataaggtttctggtggtttgcacggagttggggcttcagtagttaacgctctgtccactaaacttgatgttaccgtaatgcgtgatggcaaaaagtactttatcgatttcgatcatggccgtgttaaggatgagatgaaacaaattggcacggttccacttgatgaacatgggacgattgttcacttctatccagatccagatattttcacagaaactattgtttttgatgacaagatcttgaagaacagaatccgtgaattggcctttttgaacaagggattaactttaacctttactgacaagcgtaaagacactgccgaaacagatgtgtataagtttgaaggtgggattaaggaatacgttgcctttttgaacaagggacaagaagtattatttgatgatccaatttatgttgaaagcacctataatggcattgatgttgaagtggctttgcaatatacaaatggctataagactactttgatgacttttgccaataatattcacacctatgaaggtgggatgcacgaggccggttttaagactgcgttaacacgtgtggttaatgactatgcacataagtctaagatcttgaaagataaggacgataatctttccggtgaagacattcgtgaaggaatgacagctattgtctcagttaagcaccctagtccgcaatttgaaggtcagactaagaccaagttaggtaattcggatgctagaactgctgtagataaggctttttcagaaacctttagtcgtttcttgatggaaaatccttcagttgggcgcaagattgtagaaaagggtcaattagccgaacgagctagaactgctgccaagcgtgcacgtgaagtaacaagaaagaaatctggtctggaaattgctaatttaccaggtaagttagccgacaatacaagtaacgatccaagtatttcagaactgtttatcgtcgagggtaactcagccggcggttctgctaagcaaggtagatcacgtttaacacaggctattttgccaatcagaggtaagattttaaatgttgaaaaagcttcgatggatcgaatcttggctaaccaagaaattagatctttattcacagctttaggaacaggctttggtgctgactttgacgtttcaaaagcacgttatcacaaattgattatcatgactgatgccgatgtcgatggtgcccacattagaaccctgctgttgaccttgttctataactatatgcgcccaatgatcgacaagggctatgtttatatcgccaagccacctctataccaagttcgtcaggggaaagtggtcagatatcttgatactgacgaagaattgcatgattacttaggtagcttgcaaccaagtcccaagcctactgtgcaacgttacaaggggttaggtgaaatggacccagagcagttgtgggaaactactatgaatccagaaaatagaagactggatcgggtaagtcctgagtatgctaaagatgctgacgcagtctttgagctcttaatgggaaatgaagtttcaccaagacgtgactttattcaaaagaatgctaaatatgttgaaaacttggatgcataggaggattagatggacgagaatcaaactcaagatcatagaattaaaaacgtcgatctaactagcatgatgcgtagttcatttttggattacgcaatgtcagttattgttgcacgtgctttacctgatgttcgtgatggcttaaagcccgtacaacgtcgtattctttacggtatgagcgagttgggtgtaacgcctgataaaccatacaagaagagtgccagaattgttggggaagttatgggtaagtttcacccccatggtgattcctcaatctatcttgctatggcacacatggcacaagatttctcataccgttacatgttagtcgatggtcacggtaacttcggttctgtcgatggtgatgagccagccgcaatgcgttataccgaagcaagaatgagtaaaattgctgtggaaatgttgcgcgatatcaacaaaaacaccattgattggcaaagaaactatgatgataccgaaaatgaaccggttgtcttacctgctagaattcctaacttgcttgttaacggtgctaacgggattgccgttgggatgacaacaaatatcccgccacataacttgactgaagttattagtggtttgcacatgttaatgaaaaatcctgatgctacaaccaaggacttgatgaaagttatcccaggtcccgattttccaactggcggaattattatgggacgtggtggtatctaccgtgcttatgagagtggtaagggtaacattgttgttcgcgccaaaaccaatattgagactgaaaagagcggccgcgagcgcataattgtgagcgaaattccatttatggtaaacaaggctgaattggtgaagaaaattgctgatttggctcgagaaaagactatcgatggaattactggtgtgcgtgatgaatcagaccagacagggatgcggattaccattgatattcgccgtgatgctagtgctagcgttgttttgaataatttattcaagcaaactcaaatgcaggctaactttggtatgaatatggtggctattgttgatggtgcgccacactttttaaccttgaagcaaatgctgcaatattacttggatcaccaagaagatgttgtaactcgcagaacaagattcgagttagctaaggcagaggcaagagcccacatccttgaagggttaagaatcgctctggacaatattgatgaaattgtccacattatccgcaatagtcagtcaagtgacattgctaaagcaactttgattagccgctttggccttgatgataagcaatctcaggctatcttagacatgcgtttggttcgcttgactggcttggagcgcgataaggtagaagctgaatacaaggaattacaagctaaaattgctgactacaaagatattttgtctaagcctgagagaattgaccaaattatctatgacgaattgcttgatattcaaaaacgattcggtgataagcgaagaaccgaaattggtgctagcgaagtcgtttcaattgaagatgaagatttgattgaaaagcaaaatattctgttgacggttacccataacggctatattaagagaatgccaattcaggaatttaagactcaaaaccgtggtggtaaaggtatcaagggaatgggtgtacaagatggcgactttattgagcatttgatttactcaagtacgcacgatctgctcttgttctttactaatgctggtaaggtttactccaagaaagcctatgagattcctgaatacggccgcgcagctaaaggattgccagtagtcaacttattgcaattggaaaagggcgaaaaggtccaaactgtaattaatattccggaaggtgctgacgataattacttattctttgttactaagatgggaactgtaaagcgtacacacgttagcgaattttctaatattagaaacagtggtttaattgccttaactttgaaagatggcgatgaattaagcaatgttttgactactgatggtaagcaaaacatcttaatcgggactcacttgggctacgctgttaccttcaatgaaggcgatgttcgggcaatgggtcgaactgctgctggtgttcgcggaattaacttgcgtgagcatgactatgttgttggttcaggtattttaggtgctgatgaccaagtcttggtaatttctgaaaagggttatggtaaacggactccagcttcagaatatccagttaaaggccgtggcggtaaaggtattaagactgccaatattactgagaagaatggtccattagctggtgtaacaatcattaactcaaataatgatgtgatggtaattactactgacggaattatgattcggtttagaattgatgatgtttcgcaaactggccgtagcaccatgggtgttcgcttgattaaagttagcgatgatagtcaggttgcaagtttaaccgttgttccaactgaggaagaacaagatcaaactggtgacgatgacgactcaaaaaatggataattaattaaaaaaacaaaaaatttgaacttttaaaaaaattatcaaacttttttgcgtaataaataatgagcagtaaaaaatctgctaggatcacgtgaaaacagtttggtaattttttatttatatgctaaaattagaaattgcgagtaatattccattactccttgttcttgattttagcaagaaccatatagtccagaaggaggtgcaatagtcatggcaactacaaagtacgaagtaacttacatcatcaagccagatgttgacgaagacaacaagaaggctcttgtagaaaactacgacaaggttatcgctgataacggtggtactatggtagaatccaaagactggggcaagcgtcgtttcgcatatgaaattgataagtatcgtgaaggtacttaccacattatgactttcactgctgacaacgctgacgcagttaacgaatttagccgtttgtcaaagattgacaacgctatcttacgttcaatgaccgttaagttagataagtaattttaatttattatccgttatgtgatttaggaaaggaaggtacatgagtatgattaatagagttgtacttgttggccgtttaacacgtgatcctgaattacgtactactgggagtggaatctcggttgctacgtttactcttgctgttgaccgtcaatttacaaatagccaaggtgagagaggcgcagatttcgtcagctgtgtaatttggagaaagtcagcagaaaacttctgcaactttacttcaaagggttcattagttggaattgatggccgaattcaaaccagaagttatgataataaagatgggcaaagggtatatgtaaccgaagttgttgttgataacttcgcattgctcgaatcacgcaaggatcgtgaagcccgcggtcaaaatggtggttatacaccaaatagtggaaatgctagcagtcaacctgctaacaatttcccaaataatggcggatcacaaggtaattcacagactaataacaatcaaaataattcacaagatccatttagtggctcaggtgatacgattgatatttctgatgacgatctaccattttaaactaaattaaagaaaggattctagaacatggctcaacaaagaagaggcggccgtcgtcgtcgtaaggttgactacatcgcagctaaccacatcgactacgttgactacaaagatgtcgatctgttgaaacgttttatctcagaaagaggtaagattttaccacgtcgtgttactggcactagtgctaagaaccaacgtaaagtagctaatgcaattaagagagctcgtatcatgggcttgttaccattcgttgctgaagactaatttagatcgaaataaaccaaaaggacaggacacaaggttctgtccttttttcgtataataattaaaaaaattctctcttcgtattgtacctactgttttcaatcatgagccggaataaggtataattaacactgatatactatatctattaggaaggatcttcatgaaggattttttacgtaagctagagttgcctgaatttattaaggattcacggctgacagcttctataatcattgcactttctctttcattattgggaagcattattgcgatgattatgaatccattgtttggtttggcaatgcttttagtctttattttgaccgttgcctttgccatctatgggacctatattttagcgggtaatgcaaatagctttgcggttaatttgtcttaccggataaagcgtagtgaacaagaagcaatgattaagatgccgttgggaattttgctttatgattcggatcaccaaattcagtgggttaatccatatctgcaattatatttaaagagtacagatttagtggggcacacaattgaatcagttgaccctgatctgaataagctacttaatgaagcaattgaggcaaaaacagcagaaaatcatctggttgattgggatggtcaccgatttgaaatggtggtccaaaataatttaggcgtaatatatttattggatattacgcgctatgccaaaattgaagataaatataaagctgaacgattggcgattggtcaaattttcatcgataattatgatgagctaagtgaagcaatgcatgatcaagaattgaccagcatgagttcatatgtgcaaaatacattgagtgattatgcgaaaaagtttaacgcatatttaaaacggattgatgaagaccatttcttgatcttgatccatatgcaagaattagctgagatggagaaggacaaattctctgttttagataaggtgcgtcaagaaacgagtagaaacaatacgccacttactttatctatgggaattgcttttgggagtgattctttgtctgaaattgccaaccaggctcaatctaacttggatttggccctaggtcgaggcggagaccaggttgtcttacgtcaacccggtaaagacgcccgcttttatggcggtaagtctaatccgatggaaaagcggactagagttagagcaagaatggtttcacaagcaattagtgaactatttaaagatgccgatcaagtttttgttgttggtcatcagcgtcctgacatggactcagtcggtagtgggattggcgtagtaaaattagctcgtcttcacggagttaaagctaattttgttttagatactaataagacaaactatgatgttggtcgcttggtcaccttaatgcaacagaaaaatcaggataaggatatttttattaaccctgatgtagctttagctcaagttactgacaagtcaatgttggtaatggttgatcattcgaagtattcaattacttactcacggtcactttatgatcgtttgaagaatcgaatcatcgttattgatcaccatagacgaggcgaggaattccctgaaaatccaatgttaacctatgttgaaccatatgcttcttcggcttgtgaattggtcactgaaatgattgaatatcagcagccagctaacggtaagcgagttttgaccgatattgaagctacagcaatgttagccgggattgtggtcgactccaaggaattctcgttgagaacaggaactagaaccttcgatgcggctagttacttacgttcaatcggggctgactcagcagttgtaagcatgctcttgaaagaggacattgatagtttcctcgaacggacgcatttagtagccactttgaagatggtgaagccacatatggccgtattatgtggacctgatgataagattatagatccgatcattacagcgcaggcggctgatactgcacttgatttggaaaatgtgggtgctagtttcgcaattacgcggcgcagtgataatacgattggtatttcagctagatcaatgggtaagatcaacgttcaaattattatggaaaaattgggcggtggtggacatctttctaatgcggcaacacagattaaagatgttactattgaagaagcaaaacaaaaattgcttgatgcaattgatgaatatgaaaaagaaaatgattaggaaggacaaatatgaaagttatttttactcaagatgttagaggtcgaggtaagcgtggacaagttaaggacgtacctgatggatacgcacaaaattacttgattaagcgaggcttggctaaagaagctactaaaggtaacatgaataccttgaagcgtgtagaagctaatgaaaaggctgcttatgaagcagaaaaggccgaagcagaaaagatcaaggcagaacttgaaaaagacgataccgttgttaacttcaaatctaaggctggtactgactcacgtttgtttggttcaatctcaagtaagaagattgtggaaggccttgaaaagcaatacggtatcaaggttgataaacgcaagcttaacttgccagaaccaattaagactttgggctatactaatgttcatgccaaattatttaagggtgtagaagctactattcgcgttcacgttactgaacaagactaataaaaagtggttgtgattgatggataatatcgtttctcaacaaattccgcatgatcgcgatgccgaaagggcagttctgggtgcgatttttatcgatcctgaagcaattgcggatgctagtgcggtagttcagcctgaagatttctatgagcgggctaatcaaattgtctttcaagcgatgttggacttgtctgatcgcggggatgcaattgatacgctgaccttgcaggatgaattaaacaaaagaaatcagttagaagatattggtggtatcggttatgtttctgaattagcgatggccacaccgacagcagcgcatgttacctattatgccaaaattgtgcataggaaggcgctgcttcgtcgtttaatctctgctagtcagaagattatctctaatgcaatcgatggctctgacgatgtaacagacattctagatgacgctgaaagtgaaatcatgaatgtctcgtcagagaatagcacaggcggctttaggaccattaaagagatcgttaattcagcgattaatgatattaataatattccggatgacggaaatatggttactggcttgccgactggttttgcggaattagataagatgacaactggttttcacgatgatgaattgatcattgtagctgctcgtcctggtgtgggtaagacttcatttgccttaaatattgcgcaaaatgtagggctacacactgaaaaaagtgtagctatgttctcactagaaatgagtggagagcaactggttcagaggatgttagcttctgaaggactgattaattcacagcacttgagaactggccagcttgatgaagaagaatggcgtaaattggtagtggcttctgggtcactagcaggtgcgcaaatctttatcgatgatacgcccggaatcaagatgagtgaaattcgtgctaaatcacggcgattagctaaggaaaagggcaatcttggtcttattgtaattgactacttgcagctgattgaagggccacgcagtgaatcacggcaacaagaagtttctgctatttcaagacagttaaaaaagctagctaaagagttgcacgtgcctgttattgccctttcgcagttatcacggtcagttgaacaaagacaagataaacggcctgtattatctgatattcgtgaatctgggtcaattgaacaggatgccgatattgtttctttcttgtatcgtgacgattattatcgtgatgaaccagatgatggtgaaagtagcggtagtcaagatgaagttggcgcagaagacgataatggtgaagtagaagtcatcattgaaaagaaccgttccggtagccgggggacggttaagctaatgttttcaaagccattcaaccgtttttcaaatttggattatgcgcatgatcctaatggtaattagaaaaagcactcgatgagtgctttttctatgtttgaatataatacgaataatatttacatttataatggaaattgtttatatttggtgttgaaatgataccataagtttgctataactattactgaaaagagtaataacgaatatactcatggaggaatagcaaatttatgaaatttaagaagattttggttggtgcttgcgccgtcttggcagctgtctcattagctgcttgctcaaatggtaagaagagttcatcttcatccagtgaacctaaggaattaaacgttgagtttgtgccaagtactcaagccaacaagatggaggctaaggctaagcctttaggtacgcttttacaaaagcaattgcatatcccagttcatgtgaccgtttctaccgactatagcggtctagttgaagcaatgtcatctaagaaagtagacgtcggcttcatgccaccatattcttacatattagctcataaaaagggaattgctgatgttttattgcaagccgaacgttacggctatgatgaaccatccggtaagatgaatcataccttaatgcataagtatcgtggtatgatcgtggttaagaagggctcaaagatcaaatcttggaaagacttaaagggtaaaaagattgcgattggcgatcctagttcttcatcaggctatgtttatccagttgcggaactttacaaaaagggtttgaatgtaaccaaggactgcaaattagttaatgttaagggtgacgatcaagaagtgttatccgttttgaatggggatgttgatgccgcattcgtcttctcagatgcacgtaatattgccgctaaggatgacaagaaagcaatgaccgatgttgtgccaatctactttaccaagtggattccaaacgatactattgcggttagaaaagatatgcctaaaaaattcagagttaagttagctaaggctttcaagaatattgctaagtctaagaagggtaagcaaattatcgaaagcatttataaccattatggttacgttgaagctaaggattctgactttgatggcttacgtcaataccaaaagatcgttaacaaagctactggtggcagtaactaaaatagaataatttaattgaaagggctcaccattacgggtgagttctttttgtttctatataatatatcagttaaaatagacataaaagaaatgaagaaagaagaaaaatatgaaaattgcggttttgactgatagctcggcttatttaactaaagaacaacaagaaaaatatcaaatcgatgttttgccaattccaattatttggggcaaaaaagtatatcatgacttagtcgatattggttatgaagaattttatcaaaaactaaatacagcaaaagagctgccaactacttcgcagccttcaatcggtgatcttaagcagaagattgatgaatacgtggcagcaggctacacggatgttattgtaattactctttcaagtgggatttctagctatttctcaaccgttcagagtgttgcggcagaagaagaccgaatcaaggttcatccattcgatagtaaaattacctgtgctggtgaggcggattatgctatgttggcaggccgtttaatcgaggctggagcggatattgatttgatcatgcatgatcttaaggacttgcaaaaaacaatggatgtgcgcttcatggtggacgatttgagccatttaaagcggactggacgtttatctaatgcggctagctttgttggtacgttgttcaagattaagccgattttatcgatggatgtgcaaaatgaaggccatatttcagcgattgcgaaagagcgtcaatataaacgtgcatacaagcatgtgcaaaatgattttgataatttgactaaaaatatgccgtataagattcaggacacaatttttgattcacttgatcctgagaaaaagcaagagtggctggaagattaccaagcaaagtttcctaagtataagttcgataccagcattatcggaccagttgttggcgtgcacgtgggacaaggaacaatgtcgatgatttggtgccgtgatttggatacttattttgatgaaaatggtcagccaatcaagggaattgagtcacaagcagtagtggatccagagtaagcataataccgatatggcaaaaaaatgagaggcactattgattttttaatatcattgctatattattattaataatttaatatggcgatgaatagggatgatcagagtgtcaatcagttctttttttaaaaagttaatagccaaaaataaactcttgtttttagctatggtgattactagtgcttttgcttctttagatggcgtcatttctccttatgttattgggaaaattactaatacactttctcagaaacattttagtgagataccgaaaatcttgttactgtatctgttgatgatgctttttctgaatgttagcttttatctatggcaattttgttggggaaaaattaccaaatcaagtaatgaattattgagatctacagcttttaatacttttattgcttcccctagtgaaaagaaaatcactaataccctgaattttatcaatgttaatgttaaacaaattgaaaatcaatgtattgattcaacaattatgcttgtttactgcgttgagcaagccatcgtttcattagtttatattttaagtattaatggcattgcagcaatggttttcttagtttgtgggttaattccatcagttattccacgtttaactcgtaattgggttcagacaggaactaaaaagtggaatagcagttatgaaaactataatcaaaaaacaagtgatgctgtgcatggtttcgatactatcagacatgcaaatggtgataatagattcaaaatatttgtccaaaaagcattaatgggagaagaaaagaagtattttttgatgaattttcggcgtaatacttctaattttttagcccaggtctcttattcattatcaatggttatttctttggctgttggtacattctttgtaattaatggtcaaattctagtaggtggtttgatttctctatttttagcatcagatcgtttaactagtccaattatttcgattgttaatattgcaaatcaattgacctctgttagtcctctgctaaaaaataaagctttacaaaaatctaaaaagcaagaatttaataatttagacttcaccaaattaccaaaccaagagaaaataatttttgatcactgcaatttagggtattctaataaagctattttgaagaatattaatttgacagtttctaaaggcaataaagtattgatcatcggtcgttctggtattggtaaatccactctgttcaagacattgcttaatgaaattccattgctaaagggcaaaatactggtggatgatagtcttaaccaagctaatttctataccaattttggtattgttagtcaggatacttatatattcgctgaatctttgcgctttaatttaacgcttggaaaagattttcctactcagcaagtaataaatgttttgaaaactgttaaattaagttatttagctaatgaaaaaagcttagacatgcagatcggggagaagggattatcactttcgggtggagaaaaacgaaaactggaaattgcacgagctttattgaatcaaaaatcgattttacttgttgacgaaggactatctggacttgatgaagaaagcaataaacaaatttttgcacttcttcaaagtcttccgcagacagtaattgaaattgaacatgctgttagtccagaagagaaaaatcaatttaatcaaattattgatctaggagctcagtattgatttttttataaataaacaaaaacaattacatacgtatgaaagcctttacacataaagacttttttatttataatattagcagcacgaaaactttttggagaaaaacttacatacagaaaaggatgagaatatggcagaaaagaaatatgtcggcagtatcgaagcaggcggtactaaatttatcgtagctgtgcaagatgttgaaacaggtaaggaagtagcgcgtgatcgtattcctaccactactaacaaggagactttacaaaagactgctgagtttttcaaaaagcaccccgttgatgcattaggaattggtacttttggtccaattgatatcaatcctaactctcggacttatggttacattttggacacgcctaagccaggttggtcaggtacggacgtaaagggcttttttgaaaaggaattaggtattccggttgccatgacaactgatgttaatgcatcatgttatggtgaatatgttgctcgcggccgcaatgattctaagagttacttctacgcaacggttggtactggcgttggcgctggaattgtacaagcaggtaagttgctcggccttaataatcacccagaaatgggccacatgttggttcgtcgttatcctggtgatgattatgagggtcactgtccattccataatgatgcttgtgtcgaaggcatgtctgctggtccaagtcttgagggcagaactggtatccctggtgaaaaattgtctcgcgataacaaggtcttcacttattctgcgtattacattgctcaaatgctcttcaatgtttacatggctgctcgtccagatgtaatgattgttggcggttcagttttaaatgaagatgatttggttaaggtaagaaagttctttgatgaatttaacaacaattacgttgccacacccgatttgaatgaattaattgtgcgtcctgctgtggctcacaacgggtctgcaactcttggcgattttgaattagctaagaatttgctcaaataaaaaagcatagataaattgaataagcaataaaaaggctcaactcgttaagaaagacgtaaggcgagccttttttgacgtaatttgacctaaatgcgcgtaatattaattctagaaacgtaaccggtttattaagaaaggagcccaactatgaacaaatcagatagtggcttaaaagacaaagttatcggtaaagtgaaagaagtcgaaggtaaaattaccggcgataaatcacgcgaagtccaaggaaaagctcaacaagccaagggcaaagttaaggacaaagccaaaaaattaaaagatgatctggaaaaagaccatcaaatagatgaagattgttaaagactcaggtcgactagcaatagctaaacagaaagcaaataggtgatcctatgttatcatggatctgggttttaatcgttggcgctataataggtctaatagctggtttcataaccggcaagggtggatcaatgggatttctagctaatttaatagcagggctggttggttcaaccttaggccaagcaatctttggttcgtgggggccgcaaatggctgggatggcaatcgtaccatcaatattgggagccgtcatcttggtactagtggtttcctttgtactagggatgcttagaaaaactgaataaaaatagaataagagaaaaaagacatgctgggcatgtctttttttgtgtttcatgtgaaactattttagcttttttcgttcattttctttctcagctaaaaaacgttgcttaatttcttcaggcaaaagactagggaccgtcttgtcataaaattcaaagaatatgggtgccttgttagagtcattgctcttgggatataaggcaaagtcactttcgctaaacggtaagctgatattaccacgtaaagcattgataatctcaccgaacatatgcaaaacataacggcgcgtctcaggctctaatgacatgattacgcgactgaaacggacagtgcctaataatttatgggcagtaatttgaaaaatatcggtaatatttaattcatcaaatgcttggaaaagagcatcccataatgcaccacgttgcttttcagggatgctgtggttaaagtcgatgaagaaatgccgcaaagaacgtgcacctgaagtaagtccttctgctagaacaaaactatcacggccaacagaccaacggcgtggatcatgttgctggaccatcggtgcagtgcttttgacgattaaaacgtgttcaggatgatcaagcatggtgccaatgattgaagcttctgggaggtaggtcttcatcttgggtaatgcacgtacaaagccaggtgctttccagacttggtggaaaaagccggggccgtcaaagctaaaggccttgataatgcggtcttgcaattttggctcggctacgcttaaagcatattcagcgtaattgccgcccttagaatgccctgctaaataaattttgtcatggggaaaggcggcagccatttctttgagataattggcagcaacatcttgaccataaactttgggcatgtagttcatattcatgtcttcgttccagccgatgattgagttgtcggttccgcggtaaacgatgataattgtattatcgtttaggcgaaaagtagccgcggtaaattgaagtggataaggatccttttccagccgattagtccaattaaggattttgatgtcgcctagacgaggtgatttaggtaaaagaagaatttgatcgccagctaaatctttcatttgaacttgaaatgaaggaaggacgtgtaatttttctgcgacttcacttaaggtatgttccttagcagatttgtcgacgggtaagtagatgattgaggcgaagagggatgcgtccacgctattaaaaggccgttctttaaaagaaagatctccccgccaacgtaaataatcaagtgttccagccataatctcatcctttcattaattaggcaatattactattttactaaattgtcgcgccaaaataaaaatctcaagctaatgcttgagatttaaaatgattttacataccaccacgggtatagctaatgcgagtaatatcaggatatttacgtagattcatgacaatagagttctcatcaatcttattattaatgattccgtcaacgtataaaacaatacggttatcactcacgtcgagaattttaacagtaacattttcgacgtgattatctgctagttcttgcctgattttagacaaaatgtggtgctggttaatagccacaatttgaatgttaaaacgaacatgtggcgttattttgttgataatgacatcatcgtgaaagatcatttgaatgataaacaatagggcggttgataggataccgatgaaatacatgccagcaccaacagccatcccgatggcggcagttgcccaaactccagcggcagtagttaagcctgagacctgttcttttctaactaggattgtacccgcaccaatgaaggaaattcctgtaacgatctgagccgcaattcttgatggatctagtgcaatgtcatgcatgcttaatagatcggtaaatccatatttagatacgatcatgaataaagcagaagcaatcgcaactacgatatgagttctcacacccgcgctttttctctgaatcgcccgctcatagccgattaatgcgccacaaaaagctgcgacaacaattctaagtagccaatctaattcggttgtaattggagctaaagtttgcattatttagtcctcatcctttgtataatcaacaattattatcatttctattttaacgtaaatgcagaaaaattatagtctggggaattttttgaacttttttcaaaaaaagacttgcacagtttccatctatatggtttaataaatactgttgtcgggtaagacaacgaagagttgctgacttagctcagttggcagagcacctcactagtaatgaggaggtcggaggttcgaaccctctagtcagcattagttaaacaacttacaagtttttaagtctatcatttaagttcgaaagagcttgatatgatagacttttttgttacttataattatttgtgtagatttaaaaatagatatgaatacttagtttcaccacaaaaaatgccacacagtttttctagtgtggcatttgtgtggcaaaggtactataaatactgtaatgacaggctttattgtttgtcattttttgatttatctgaattatcagatgaaaagaaattttctttagcaaattgtagactctgtataccttgatcaatagctgataaaagttcttttttagtagcttgagtattgattacttttgaagcagttagttcaatgttatgagccatattatcaacttcatcaattaatatattaaagtttctattatctacatctttagaatattgatcttttaatttattaagaactaaattttcaaattctttatttgttgttccaactagggaattgataaagttaagatctttaaatagaaaggagaaatcttttttccaaaattcattgatttcatcaaattgaggaaaatgtgttttttctgctgtcttatcaatatcgccgtctttattacgataaaaattcagaggagtattatagtcacccaaaaatagtaggtagttttttaagtattgatgaaattcatcagtaaagtcagaaacgttaaagtatttattatgtaaaagagatactaatttatgatcaacgtctgatctttgggtgccttttcctgataaatagtattcagaaacattaagcgcatgtgcaagtttactcattgtttggggagatggatagttaacaccactttcatattttgcaattgtgcctctggagatgtttaatcctttttcatttgatagataatcggagagttgggcttgagttttatccattttttctctgatttctttaattctaggtaataccataaaaatcctcccttaaatattcttcataattataacatgctctataaactaaggagctaaaaatatttatttagctattgaaaaggagcaaacaaaatgatataactatttatgtagaaaggagcataaatataaatagttcatcgttataaggagcaaataatgtatatgctctaaagtgtagaacataaggaggttccacatggcacaagataatacaacaaaacaaggtgaattgctttccacctttaatgagagcaacagtaagagaactccgattcaatcggctttaactcgaccattagaggaagctatcggtaaatgcttcttgttactaagcggaacaacagaagaagtccaagattctaatgatgaaagtaaaactattccgcgtgcagtatataaagtacgagttgtaagttctaatacaagactagcaattggtactgtgttaaccgtgaaagttaagggaagcaaaagtgtaattactgatgatgaaaataaaaaatttttgtttggtttagagaaaaataaggtagttgcctttgatgatcttagtcattggaattttaacggaaatgaggggctatctgcgtcaaatattagaattttggaagtcagtcctcaagaagctatgaacttataagggctaggaagtgattttgtgaaaactaagagactagtattagatacaaaaaagccgctaggtaatcctagcgggctaaaaatggcagaaggagtaaccttattgttatcaattgcagttgagtataaggttgcgcctaacttgttaagcacgggcaattacacagctcttgcttatccatttttagtaaatattatacccttagggtatccatgttggaagtggattaatcttcatattattaactataaaatctataagcgattaatgagcatcattcattctgaacaacttatagattatgcagataaaaaagaaacaacaacttttaatgaacgaaaagttgaatatggcgtcaagattatctatgaagaaacatcagaaggtatatacattactgtatatcctaatggcataaagcatagtgatgctacacaaacgctaaatagcaggctagaggagaccttcaacatgaatgtcttatcagtagatcaccaattatcttatacaagatacttgttaagagatattgataagcaacaaatgaaggttatggatgatgtgttttagttttaatattcaactacgcgtggtgctagttaaatcgttttagttaataaaaaagtccaattagactagactcaagttgtaagtaatttaaatagaaaagagtctgatctaattgaactatctcaagcttaatcgtttttctcaccatttacaagttagttttaatcggttaaatgtgatttgtcgctcgctgtataagctttatgcgcctgatggacttaaacatcgtaaaaatgttgatcagaccaagcttcctgatagttctatcttagcgatgctcatttggcaaactgaaattggaattgaatctcaacgaagattctgtaaattcttcgttggcttatctcattctcgttttaaccgtcgagctcgaatgctcttgcctctaattcgttgtatccgtcagggttggaatcaggaagtaaaggtaggtggagaattattgattatcgacagttttccgattccagtttgtcagcctgttcgcaattatcacgttaagatcttccgtggcatagccgatattggttataaagcgacgaaaaaaatctactattatggcttcaaagtccacgcaatagtgagtgatgatggctatctgcttgactacgcagttactaaggcgtcggtacatgatgcaaaagagacggtagaattgatgatcaatgctcatccaattaaccattatcttttaggagatgaaggctatttaggaaaagacttagcagccaagctaaagcgtatgggatacgtgctttggacaccatatcgtaaaaacatgaggggtgctaaaaagcataatgatcatcagttaatggcaattagaagaacaatcgaaagcgacttttctttgcttagctattacaatgctgagaataatcgagccaggagcttagtaggttttcaacaacggctagaaatagctattttagcttataatatggcatattgtctagaacgatttaactagcaccacgcgtattcaactagataaaaatactagttttagtcttaagggctcaggaggtcttctgatagtcggtcgtagtgggtcaggcaaaactaacactacgacttatattatgcttaaggctgtctctcaatgtgattgcggattatacattattgatgctaaaagagctgatatgtatggacttcatcaatttttaaaagatggcaagaaagtagtagcaagtacaacaaatcaaatagcacggctattgcgtgtcattaacgagaatatgagtgcaagatatgagcacttcaaaaatggaaaatggggacaagatttctcagaatatgggtatcgaccttatctattagtcattgatgaagtatcagctatgcttgctgaagctggtaagaataaaaaagagataatgggtgaattacgtcagattattctgcgaggtcgacaggctggaatctttacacttatctctggtcaaagaattgatgcaaccattttagatcgtgatattacattgcaattaggcacacgaatcgttatgggacaagcagactcggaaacttatcgtatggcttatccaatggtgaatgatattaaagcattaccattagttccaaataaaccgggttatggtcttatctattctgatggacaaaagattagcaatcctactccgtttgtgtcacctgatatgtctaatattgatgtacctaaggtaattacccgactggaaaataattatgactcgtctaagtataatgatgagtctgattattggcaattatagttattttagttgccagctgacgggggacggagtcacccgaatggaatgttcaagcgtgagcgggctggcaacacccacttaataatatgggtgtaacggaaagattattaatcatggaaacgatgaataatattaaaattgatcaacttcgtctaaatattccatatgatgaaatctatcaagtagaaaatagtcaaagtttacccaaagaagttatagtagctgataatctgctgcatctggcatggttgtttaagtctaatacagtgagtcatggacataatggctatacttcttcatataatttcggttcaggagaacaaggcggaaatatttccgtaatgtggaacgagtcaagaaaagatatgggaatactagtcgactttactgcgacaggcaaagcgctatatgaaagccttgctgaattacatggaattcctgttaattggaagaaaataattgaagaattatatgaaaaaatggggcatatatcgaggctagatatagctactgaccttattaattatggtttttcagttaacgaaattattcaaaggttaaagaatgaagaatcatttttcttgaatactcaaggaaataaaatcaatgctaatcgatttaagataattggaagctatagtgaagctcagactctatatatcggtagtagaaaaagtgatgcttttctgagaatttatgataaaaaagttgaacaggatcgagccgatggactctatagaaacttggctagaaactgtaacgattggataagagtagaagcagaatttaaacaccgtttagctaaagaactaggaaaatatattacaacattaactgcagataatatttatccttatttacttggctgtgtactagaacgttggtcattagttgatagggaagaataatgacatatgaaaaattccaatattctaaagaatggaagattttaaaagagttatcgaaaggacaaggacttcaagaactaaaacaagctcaagttgacgcttccctgaatagaaaaattaattggttcttgtatggtggtgccagtggagttattacgttgattaaagaaatttatggtgatgaagcactaaaaaagttttatcaatttttagattattttatttctaatcctgatacgttaggacattactaccactcggacaagataaaggcggatactaaaactattgcagattctacgcaaggcttgaactttggagaatatttagaagacttaaagagagaattagttgagggagataaacagaaaggcaggggctaatatgtttggcacagagttactcaacgctagacaaatagcagaagaattaggtattagctatacttacttttttaaattaattaaaaatgggtgtccttatcatcaacttggagaccaaggacgtaaatattacgttttaaaggaagtacaagagtggctattagtaagtagccaacattaattagaagacgtagcaacttgctacgcttttttaggagaaagctatgtcaattacacaaattaaaacggggaaaaataaaggaaaataccgtgttagaattcaacctactgataatgaaacaggtaaaactattccgattcctagtaaagtaacaaaaactagcagtaagcgtgaagcaaaacaattagaagaacaaatgtgggtgcaatatcgcgcgcataaagaaatgaatttaaatgtattagatcaaccacttgcaaaagctttagatcactatgtagaagaagaaagaagttcggggcgttggtcatcgattactacgtatgataattggaaatatacggttaagcttgtttctcaatatttcggaaagaaaaaagttaaagatatcaaagaaaaagatatgcgtagttttgctagaaattacataagtacacataaagcaactgtggcacctcattcaacgctagatagacagttacaaaatttaaggagttattttgctactttgaaggaatatggtgtcttaaagaatcctattcctatgaagccattaactaagttttttagacgtgatgaaatgaatgcccctgttaagaaatatgttttcactaataatgaaattaatgttcttaaagatagaatttatagagagcttggagtaacaagaataagttattggacaactagaattgctatcttgatagctctagatactggaatgagacctcaagaaattcaggctttaaagtggagtcaaattactaatgatggaagttttaaagtttttagaataaatgactcatggaatgaaaaagagaagcatcttaacggacatttgaaaagtcgaccgcatggagaatctagactaacccttcccctttctgaaccacttttgcagttattgaataagtttcgtcattgtcagttagaacttttaaaggagaatggtttaactaattttaatgatcgaattttattgaacatcacagattatcacttgtgcgcattagggtatccaataactcaaaaaagtatgaatgatatgttgaaacagttgagtaagaaagtaggggttaataatcaaaatttaaatataagtatgtatacttgtcgtcatactgtagcaacaaaattagggaatacaccaggcatgtcttacccttgggcggcaagcagattagggcattctttaaagatgtttatgcggacatatgtacatgttgatgaagatcgaaatgaagaaatgcttagattgatagctaaaagataaaagaaaaatgcaaaaataacttatatttgataaaaaaatgaattaatgtagcaatagcaagaatttgaaaataataaataacaaataatttttaacattttatagattttgaaaaaaaaagagcgtatactcagggcatcataaagagatgtgaaggagaaatcaaaatggttattgtagaacaaaagtttaataaatataatcatacaagcaacatggatgctatggagtacgctgcaggatgttgcacatgtacaacaacaagttgtacaacttcatgtgccgctgtagctgaaagttaatggatagttggcgctgtaaattatattacagtgctttttttaggagtataaatactgttatgtgtctattaagaataaaagacttaaaagttaattttaaggatcaaacagtactggattttagaggtcatgatatagagataaagtcaggagacaaagtagctctaattggaaaaaatggggcaggaaaaagtacactattaaattgtcttttacatgaagtaaaatacactggctgtataaaggagaagtatcatcagtcggatataggagtagtttttcaagaaaatgtatattttaaattcttgaaagtttatgaaatctttgaattagtgtggaataaacctaaaaagttaattttaaaatctaaatttattaagaattttaatttagcaagcattatgaataaatacatttctgacttatctggtggtgaaaaacagagattaacaatagctttggttttttctcaaaataaaaagatttacttactagatgaaataaattccggcttagattatgataacaggcatgaattaagtaaaatcataaataatattactgaagaaaaaacagtaatacaaataagtcattattttgaagaagttgaaaattgggctaataaattgataatccttgatagaggcaagatgatatattttggaagcttatctaagttttattctataaataagcatgattcattaattattataaatgataaaaaaagcctatctagactgacccagaagcctttaaatctttatagtaataaatatattgtatctagtagtattgatgagagacatgatataacaaatttattagagcaacaaaagatagattataaagtggtgccacaaaatttatacacaacttataaattagcattagtaaaacatgaggataggtaaaataatggctagagaaattttattaagtttaaaagcacaacttagagttccaattgctgtatttttttctattttttttccaattattatgatgattatgatgatgacatcttacggtaatttttcattaagaaatggatatcactttatagataagtatttttttattagtactactataggtattctacctctaaccttaattagttttcctattgatataaataatttgcttgaaactaagcattacttgcgtttgaaatacttaaatgttgatttaaaaaaattatttttatcaaatattatttcttatttgataattgtatttatttcagttggaataaatttaatagtaggaaaaagtatatataatttaagattacctagtatagagtatttatgttatttttttattcaattattctattgtgcgatagttctacttatatttggcttactgttaagtttaatagtactgaaacttgaaagctaagattaacgctccttccccgcgcctcttggctttttcttatcaaaaataaaaacgcaggctctctctgcgttatactttaagtgtcgacctaaaaagtaaaggagatcctgcgcaatgaacagtatagaacaaatcgacacagaaaatgatactaaatccttaatttcttcatttattaatctaattggtctagctaagttaactaaacaagtcaattttaagcgtaaatccaccgtttcattaaccatgattatctcttggctgatgtcagtacattttgctcggctttctttattcagagctaaggatgacaaacgtttttccgttagaactgctcgcaatgtacttaacgatggaagaatcaactggcaaaaactattatgcttgattgcagcccggctcattggctgcttaaaaccatttatcgataaaagacgccgacttgcttttatcgttgacgatacgctgatggctcggtctttttctaaaaagaccgaattgctagctaaagtctatgaccatgacaagcatgagtatttgaacggatatcgtggtttaactttaggctggagcgatggcaataccttcttgccggttaactttgccttgatgtcaaccaaaaccaagaaaaatatgattggagctgctcccattactgctgatgaacgttcaatttctggtaaaaggagaaatcaagctcagagaaagatgaatgatgtaactgtagagttgattagacaagccttacgattaggagtagaagctaaatacgtcttattcgattcttggttttcttctccaagaatgttttggattttaaagaagatcggtttagatggacttggcatgatcaagaagagttcaaagatttattacatttatcgccatcgccgctatagcgttaaagacttgtatgatcgtttggctgcttcaaacatccgtaaaaagaaacattatctttattcaagcatagttgaggctcaatatcatggacatagctttttattaaagctcgtctttgtctccaaccgtggaaacaagaacaagtatttggttttagctactactcagacaaagcttagccctgaagaaatcatccaactttatggtcgtagatggcaaattgaaacatattttaagacgtctaagcaatatcttgctttagataaatctcaagttcaaagctatgatggccaatgtggctatatcgcagttacagcaataacttatgatctattgacctggcaggaaagacaaaatacagatgataagacaatcggagatttattctatctaatgaacgaatccttacctgatattagattcgtagatgcattggtctacttaatttcagaattaaaagagcttaaacagaatagttttgaaaagatagatgaagtaatcaatgactttattaaccaactgccacgattcatacaaattgcactgaaacagatcatataaaaactaattacgtctaagaaagctcaatagtgacaggacttgagcttgattttggtgctttcaattttcagttaatagtatcagatatcaaagctttaatgcctgtaggaatgactataatgtttatattatttatggttataggtgtttttgtacagtatagctccttaccgaaaattatacgtactatttctagctacataccagtaaaatatttggcaaatgatttctattatatctggattggtcaggctaaatggaatatgccattttttaaatgtaatacgatctggcttatttttctgtgtttgatttgttacataatttatagaaggaagaataatgttacgaagattttcaactagtaaggatttaagaattgggatagagataatagttggaatcactttatcatttatcattaattttataatgatttcaattgggtatgccattacaaatagtgaaaaattaaaagaatattcggtcaattattttggattagtcatatataaaataaagaattatggaaataaaggtataccagtttccaataatatgatgtttatcggaatagttttaacaataatatttgtttttattgtagagtgggttgtatataagagggataagaatggtagagtatgagcttaaaggattatttaatcaaaatacgctttcaacatcagatattagtaatacgcgtggtgctagttaaatcgttctagacaataagccaaattataagctaaaattgcaatttccaaccggctttgaaagcctatcagactacgtgctcgattgttctcggcattgtaataggtcagaagcgaaaagtcgctttcaattgttctgcgaatagccatcaattgatgatcattgtgctttttagctcctgtcatatttttacgatatggtgtccaaagttcgtaacccatttgttttagctgttgatgcagttctttgcctaaatagccttcgtcgccaagaagatagtaattagatggatgggtattttctatcagttcaactgtctccctggcatcatgaactgatgcctttgttacgacataatcaagaatgtaaccgtcatcgctaacaatggcatgaactttgaaaccatagaagtaaattttcttggtggccttataaccaatgttggcataaccgcgaaaaattttagcacgatagtttcgaattggttggcaaacaggtaccggaaagctgtcaatgatcaagaactgtccattcaggtcaacctttttattcatttcttgccgtatctgataaatcaattgcaatagctgacgtgaacgccgattaaaacgtgagtgtgataaacaattgaaacattcacagaatcttctttgtgattcaattcctgtcttagcttgccagataagtaaagccaaaatcagactgtccgtagttttaatttgatcaatatttcgccgatgagtaaactcagccggtgcatacaaacgataccagtgccgacaaattatcactaaatctttaaaactaacttgtaaatggtggccaaaacgcttaagcttaaggcagttcaatcagatcagactcttttctattattactatttacaagtcgagtctaacaagattggacttttttattaactaaaacgatttaactagcaccacgcgtattagtaataataataattacaataatcaacaattatttgatcatattataagaggaaatgctaattctgagatgctgacatacttacttaatatgaaccatcagcgattgaatgattttaagagtatgcatcaatataattatggaaattttgcatccttaatgaacagtgtagaacagtataacgaaatagaaaatgatgaaactattttgctacctaagccattgagaataaaaaataagttacagcaggttctaaagaaaagaaaaagtgttagaaattatataggcttatcatgtgatttacgagaattgtccacaatattgatgtattcatttggaatctcgggaagaaaagagaattttggtggaatagtcgcaagtatgcgatattacgcttctggaggtgctctatatccaatttcagtgattatatatataaataaggtggatggattgaaaaaggggctgtatttatatcagccaatgtatcattccttattaccactaaatattaaaactcaaatcgatattaataaattatttgtaggaagtaacattgatgttaaaaatagtagcttttttgtattttataaatatgcgattagttctacatatttaaaatatggtgagctatctttagctaatattttgattgaagcgggaatgatggcgcaaaatttttgaaactgtcaaatcttttgtgtaaatagatctttctcgtaaattgattttttaattatttatttaatcaaagtaggattctaaggtgtcctgaacctgaccaaagcctttatgaattcgattgaaataacggtcattgtagctcattgcctgaatgccaataaaagcatcaagcgactgttcagttggaaactctgccttaggcttagctttgcgcttgatcacattgttaaatgattcaatcatgttagtcgaataaattgaagctctgatctgcttgggatagttataaaagaccagcagatctggttctatgtctttcaagcttctgataacatggctgtaaaccttgccccatttggtatagaagtcatgcaggacagctgtggcttcttctttgtttgtctgttgatgcacctgtttgaattcgttcatgatcttttcacgatcgtcgacgcgtactttagcgcagatattgcgcatgacatgaaccaaacagcgttgaaaatgagctttaggataagtcctggccaaggctgttttcatgccaacaacaccatcagaaagaaaaagctcaacttgctttaagcctcgggatttcatgttttgaagcatatctgtccagacttcaatgttctcgctaggtgcaatgcagtagtcaatgacctccttgtgcccattaggcttgatgccaatggcaatatagactgcttcacgctcaaatgtttctcggcgcaaaggaaggtatgtcgcatccaaatagacgcagaaaaacttgtcgcttagcttgcgtttgtggtaagcctcaacctttggaatcatctgcttggaaatatttgatacctgagctggactgtaatggctgccatacatcttttcaattagatcggctatttccctggtggtcacgcccttggagtaaagcttgataatcatgctttccaagatatccgagtgctgcttgtagccaggcagcgtgtgctgatgaaactgaccgttgcgatcccgaggcacttgcacttcaattgggccaaattgcgtatcaactttgcggaaataagcaccatttctagagttgccagtattccagccatttctggcatagggatcatagcccagaaaggcagtcaattcagcttctagcaatttattaacagcctgttgtagctctttgcgcaataaatcatttattttgtctggattgaatagagcttgagcaaaatctttggtaaaatcattcatgaaggagttcttctttctgtatgtgtttttttgttcaaaccaatcatacgagaaaggaactcctttttctaatgtttaaagaaataaatttaaggaatcattcatccttacacaaactattttacagtctcaaatttttccttagtaactacagcatgtggttttgggtcatgtccaattgcaggatataacaaaagatttattgaagatatttgtaatttagatcatgttaatgagcatataatttttactgaaagttgtgggagaaatgaatagcgatacgattttttttgtaaaaaaagatacacatattaattctaatataaacgaatggatattaagtaagggaataattcataaaagcactttaacaataagtaaaaatgaaagtagtactttgtttgtaagtttattcaagcaattaatacaaaatcaggaaattaaagttagtgaagatgatgaagagtattcagacttaaaaaaacttgttcagcttggatttttaggaataagaaataaaaataaaaaagtagcacttattgtggaagaaagtgcaaaaaacttctttgaaaactatttaaaagatgaaaatatatgtgttagctcattagatgagtttataactcaagatacattaaatattttaattgaagaaaaaaataatactaaattaaataaaatagttcaaaactataaaaataaatacaaagatgtagatttgatttttgtttgttctttgtattatgaaaattatttaaaaggaatcaacaagctaactaaattaattagtatcccatataatataggattttatgataataataatatatttgctactagaataatacatggagagactggctgctatcaatgtcttgaaaatcaaatactacaaaaatttgatggatatatcgaagattatgtatcagaaatggattctgaaaaacaagtatttgatacgcgtggtgctagttaaatcgttctagacaatatgccatattataagctaaaatagctatttctagccgctgttgaaagcctactggacttcttgctcgattattctcagcgttgtaataactaagcaaagaaaagtcgctttcaatgctttttctaattgccatcatcgcttactattgcgtggaccttgaagccataataatagactttcttggttgctttataaccaatatcagctacgccccgaaagatcttgacacgataattgcaaacaggctggcaaactggcactgggaaactatcaataatcaaaaattctccagctgtctttacttcttgattccaagcctgacggatacaacgaattagaggcaagagcattcgagctcgacggttaaaacgagaatgagataagccaacgaagaatttacagaatcttcgttgagattcaattccaatttcagtttgccaaatgagcatcgctaagatagaactatcaggaagcttggtctgatcaacatttttacgatgtttaagtccatcaggcgcataaagcttatatagcgagcgacaaatcacatttaaccgattaaaactaacttgtaaatggtgagaaaaacgcttaagcttgagatagttcaattagatcagactcttttctatttaaattacctacaacttttattaactaaaacgatttaactagcaccacgcgtgtatttgatataaaaaattatggagtattaatatctataattaagtcagagatagaagaactaaatttatactctgatacagagctacgaggaaatgttcttcatttttatttacctacttatgaatacaattttgataagaatagaattcaaagtgattgctcagtttgttctactataaataatattttatttaaagaacaaaatatgaaagcgtgcaatattttagccgaggttttaggtaatgataaatatcaagaataatttagaatataatttattgcgtcaacggatcttgggtggcgctataactggaatctggaaaaaggatactttctttattggcgaaagttcgtatccggtaatgaattataattatattactgcaaactttactaattttgaaaaattcgcttttcctggctatgttcccccgattaattatcatcttagtggctacggcttatcttataataaagctttatcggcttttctaggtgaaagtacagaaagatattctttttcagtcttatatcaaaacattaagcataatatcatttattctgattatcaaaatcttcagaaaaagtattctaattgttatatagtacctttaaattatattaatatttatttttcaaaagaagataaagaaaattatataactaaaaaagatccaataagatggatagcattaaattcactatttgatattaataaaaaggtactagttccgcttcagttttatattatgtataccaacagtatatttaaaaatgaaaaaagaattgtaaatagtgctacatcaacaggaactgcttcgcaagaaagctttgataaaagtctggaaaatgccatagttgagttcttacaaatagattcttttaatctttggtggtatggaggtctaagaggtaaaaatttaaatattgatacagaaggcttattaaaggaattgttcccaaacaataatagactttggatgtttttaaaaaaatttacggttaattttatagatattagttttgacaaagcaattaatgtagttgtttgcgaaattaccagtaatagtgatagtaaactacctaaatatgtagtaggagttcaaggaggattttgtttaaataagtgtattgaacgatccttttttgaatgtgtaactgttttagaatattgttttactcaaagttgggttgaaggttctaaatttaaaaagatttctacaaatatagatgatttaaatgtaaataatttagacgataatgtattgttttatgctaaaaatggaaagcctaaattaatcaaaaaagagaatattttaagagtgtccaaaaaggttactaatttaaaagatttgcttttgaatttaaagagcatctctaagtatgcaggatatttaaatattacgcctccagaatttagaaatcaaaactttgaaatatgtagagtatttataccagagcttttaccaatttctttaccgtcttatccgccttattatcatccaagatacagtaaaataggaggtattattaataatgtcccccatcctttggcttaaaatagcttttttcatcactttgtttccaggcggaatatatttgataataagaagaatattgtccagccatagaaaaagcatgacagtatatttaataaccttggtaattgtagctattgtaaataccattattttaaagatcaattttaataggtatattgaaatcatcttaatattgattattccttttacgtattatttttttgagtatgttataaggtataaaagattcaatatcttaagttttaaggctaataaaacaattatttatgttttagttttttttcccggatttaaaattgaagtgcaacactaagtgttaaacaaaaaggccatgaagacctaaacttgaagtgacgaaaaatcaagaaaggaagatctttatgaccaattcaaattctagcatttctaagcactatcatcaattaaccagcgtacaacgtggacaaattcaagcaatgctggattccggcataacttcccgtactgttatcgctcaagaagtcggctgccataagtcgacaatcagtcgcgaaatcaaacgcggaagtgtcctgcaaagagacagcagctatttattgtatgagcactattacgctgatactgcacagatttattatgagaagcgtcgcaaaaactgctatcagcgcaatccattgaagcattatgctgtctttttgagaatgctctccagacgctttaaagctaaatttgatgccaccagcatcgatgagttcgttggtgaattcaaaaggactatgccaggctacccttgtcccagcacaccaactgtctatcgctatattgatcagggcttgctggacataagcaatattgatctgcctatgaagctcaaaagacgcaggaacaagcgtcatcacagccatggcggtcacgctttgcacaagaagcatcttggcaattccattgaacagcgtcctaaagagattgaagacagaaaagctccgctgcactgggaaggagatctggttaaaggcgtcagacgcaagaatcagcctgctttaatgactttgactgaaagaaccacacgctttgaagtagttatcaagattcctgactatcgggcaagcacatgccaaaggctgcttcaaaaggagattgacagacatcctgcctggtttaaatcaatcacgtttgacaatggctctgagtttgcggatatgaccaagatcaagggctgccagatttactttgctcacccatattctccatgggaaaggggcaccaatgagaactgcaatggtcttttgcgtcaattcttccctaagggcaagagcatgaaagacaagtcaaaagcttatgttcaacaggcaactgatgccattaaccacaaatatcgccgaatcctccaatatcacacagcagaagaactcttcaagcaatatatttcctcatagcctaactgttgcacttaatttgacaattcaggtttagttttttttcctatatttgaagaagttgtttaccgtttctttatatttaaatattgttcggttttaggcttttctggaatacaggctatgatatttgcaacgttatgctttgaattttcgcacatatattatttaggctttaaagctattaataaattatttttttcctttattcaaagtatgttgtttttggtttttcaaagtttattgtgagactgtaaaatagtttgtgtaaggatgaatgattccttaaatttatttctttaaacattagaaaaaggagttcctttctcgtatgattggtttgaacaaaaaaaacacatacagaaagaagaactccttcatgaatgattttaccaaagattttgctcaagctctattcaatccagacaaaataaatgatttattgcgcaaagagctacaacaggctgttaataacttgctagaagctgaattgactgcctttctaggctatgatccctatgccagaaatggctggaatactggcaattctagaaatggtgcttatttccgcaaggttgatacgcagtttggaccaattgaagtgcaagtgcctcgagaccgcaacggtcagtttcatcagcacacgctgcctgactacaagcagcactctgatgttttggaaagcacgattatcaagctctactccaaaggcgtaactaccagagaaatcgctgacttgattgagaaaatgtatggcagtcattatagtccagctcaagtatcaaatatttccaagcagatgctccccaaggttgaggcttatcacaagcgcaagctaagcgacaagtttttctgtgtctatttggatgcgacataccttcctttgcgccgagaaacgtttgagcgtgaagcagtatatattgccattggcattaaacctaatggacataaggaagtcattgactactgcattgctcctagtgagaacattgaagtctggacagagatgcttcaaaacatgaagtccagaggcttgaagcaagttgaactctttctttctgatggtgttgttggcatgaaaacagccttggccaggacttatcctaaagctcattttcaacgctgcctggttcatgtcatgcgcaatatctgtgctaaagtccgggtggatgaccgcgaaaagatcatgaacgaattcaagcagatacatcaacagacaagcaaaaaagaagctgcagctgtcttgcacaaattctatgccagatggaataaagcttatagcaatgtcatcaaaggtttgaaggaaattgagcccgatctgctggtcttctacaattatcccaaacaaatcagagcttcaatttattcaaccaatatgattgaatcctttaacaacgtcatcaagcgtaaagctaagcctaaggcagagtttccaactgaacagtcgcttgatgcatttattggcatccaggcaatgagctacaatgaccgctatttcaaccgaattcataaaggctttggtcaggttcaggataccttagaatcctattttgattaaataaatgattaaaaaatcaatttacgagaaagaactatttacacaaaagatttgacagtttctttattgttaataatatgtttacacataatttttaatttatatgtgtatttacacaaaaaagatatgtataaagttattttttgatattgacttgtattacgtatataacaatatgtgccacacggtttctagaaaaatcctaaagagtgctaattttaaaagcaaaaattgttaagccttttacgcttctagtcagcattagaaatacgtttaagtctttcaaataagttcaatgaagcttgatttgaaaggcttttttgctactttgaactagaatgaaattctttgaaataataaggatttatttgaaattaacacaattcaaacacacagatacgattcatgtgttaagaatgtgcttgaaggaaaattaagagtactaaatatagtgatttaacaggcgttggagcctgttttttttgtgtttggttagggcattttgtttaaattaaattcagtggatttttgtgcaaaaaaatagccatattgtagggttatacatattgactattttctattattaaaattatttcaattcagccacaaacctaattccttgataagaaggaaacttgtaattatcccatgaaaaataagtgtctggaaattagttctttctatttaatctcaatgctatttcaagttagctattaatctgtatcctaagaatccattgctagattttggattccaagcaatacctacaccaatttttgtatattgaccagataaaagaatgtctctatgtccccaattagatcctgcatcatgataaatgaaattatttaagcaaatttttgcttgtgtagatggggtatcagtattatcaactgcacctccagcaagcacttctgcgtattgagtgcggcttccgtctggccttgtatggctaaaacttgtatttgcttcggtagctctagtccttgcatattcttgcagagaagtatcaagtgttaaagaatttagtccctttgattgacgtaattgatttaattgcgcaataaattcttgttctaatttggtagcaaaatcagaatccttaatgtttgtatattcattattgggttttgtatttgtggtttcattatgcttaataaaattgcttgaattagcactttgagtatttgtttcatcggatgtacttttagtaatagcagatgttttagaagtgtcaggttctgaaactttgtgagttaattctgaactaatccatttgttagttccaactttgtaccatgttttaccacggctatccttcttttctgcataaacatataagtattttttaccatgaattattttagtgcggtaagcttttacacttctgcctttcttgagtgttcttgctcctttaatacgcttgcctttatagttgtaaacataagcattgtgagtaagtcttacgctgttagtgcttgcttctactacattggcttgttcgttgccagcaacaactgtagctgaaagcaatagagctgatgaaagcgtaatggttgatagtaatttagtaacgtttttcttttgtaacatggtagttacctcctatattccttatttcagattagcaataagactgtaccctaaaaatccgttacttaatacgggatcgaaagcaaatccaactccaatttttgtatattgactagataaaagaatgtctctatgtccccaattagagcctgcatcatgatagatgaagcttctcaattgttggctggcttcttgctctggtgtacttgtgtcgttaactgttcctcctgcaagtacttctgcatattgagttctacttccatcgggtctaatatggtcaaatttagtattggcttcattagctctggttactgcataagattgaagtgtattatctatgcttaatggcgctaacccattggatctacgtaattcatttaattgagttacaaaagattgttcagtttcatttgcaaagtttgagtttatgaatttgaatacgtctgttcatttgaagccgaattattatcttgttgagtaatactttgtgaatctgctttttgacagtttttggaactatttctttttgtataaaatttatcagtgtcagtagcaagtatccatttgttatcaccaattttataccaaattttatcgttaactttttcttgagcataaacttttacagattgtccgactccaatgtattcgccagtaggtgattgattgggagctttatatgtttcacccaatccattatctgtaatttttgcagtgaacaaataatttgattttgtgttttgcacatttgcgagcctgatatagtgatgactaccaatgtataaatattttgtgccacgtattttcttagtgcgataggcttttacatatttgccttttttgagtaatttaacacctctaatacggttgcctttgtagttatagacataagcattatgcgtaagtcttacatttttagtgcttgcttccactacattagcttgttcgttacttgtaacaactgtagctgaaagcaatagagtggatgaaagtgtaatggtcgatagtaatttaacaacttttttcttttgtaacatattagttacctcctacggatattcattatttcaatttctaaattaatgatacatgatgtgaaaatgcatttcactgctgtttttctttgctggaattatatttatctctcgtaaatttataaaaaagtaaaagattgaaaagttaggtgcatcatttaatacaaaatataaactgaaatagattctcgttgaatttggagactgtaaaatagtttgtgtaaggatgaatgattccttaaatttatttctttaaacattagaaaaaggagttcctttctcgtatgattggtttgaacaaaaaaacacatacagaaagaagaactccttcatgaatgattttaccaaagattttgctcaagctctattcaatccagacaaaataaatgatttattgcgcaaagagctacaacaggctgttaataacttgttagaagctgaattgactgcctttctgggctatgatccctatgccagaaatggctggaatactggcaactctagaaatggtgcttatttccgcaaagttgatacgcaatttggcccaattgaagtgcaagtgcctcgggatcgcaacggtcaatttcatcagcacacgctgcctggctacaagcagcactcggatatcttggaaagcatgattatcaagctttactccaagggcgtgaccaccagggaaatagccgatctaattgaaaagatgtatggcagccattacagtccagctcaggtatcaaatatttccaagcagatgattccaaaggttgaggcttaccacaaacgcaagctaagcgacaagtttttctgcgtctatttggatgcgacataccttcctttgcgccgagaaacatttgagcgtgaagcagtctatattgccattggcatcaagcctaatgggcacaaggaggtcattgactactgcattgcacctagcgagaacattgaagtctggacagatatgcttcaaaacatgaaatcccgaggcttaaagcaagttgagctttttctttctgatggtgttgttggcatgaaaacagccttggccaggacttatcctaaagctcattttcaacgctgtttggttcatgtcatgcgcaatatctgcgctaaagtacgcgtcgacgatcgtgaaaagatcatgaacgaattcaaacaggtgcatcaacagacaaacaaagaagaagccacagctgtcctgcatgacttctataccaaatggggcaaggtttacagccatgttatcagaagcttgaaagacatagaaccagatctgctggtcttttataactatcccaagcagatcagagcttcaatttattcgactaacatgattgaatcatttaacaatgtgatcaagcgcaaagctaagcctaaggcagagtttccaactgaacagtcgcttgatgcttttattggcattcaggcaatgagctacaatgaccgttatttcaatcgaattcataaaggctttggtcaggttcaggacaccttagaatcctactttgattaaataaataattacttaaacttcccacatcaaataagctggcaattctttgatattgcttagctttgggcttctatactatttttgctagttttctttaacaatttttgcatgtatttgggtaaacgattgataaagtcagccgtgaattctgctatttgtgcttcactggcatgaaagactttttcaacgctagccaccattgcttttgtgattagctgaagtgaatgactgaatgtaatatccgccagctcatcaatcatgcaatagaaaagctcacctaaggttcgctcatcttcgtcgtcccgcttggctactgacatgagcatatagcgggtaaagactatagccacatgagcagtcaaggcatcgtaggacagaccatgatattccgtgcttagttttaggtagcttttgcaggttttgaaaaaaacttcaatatcccagcgtttgccataattgcgaatgacttcatcttcgctaagcgacatgtcggtacaaataatagccagccactctttacgattggcacggtttctaacgcaaattatccgagcgtcaattttagcaccgtctttgtcttggcggccaaccttgactggaattgacaacatatagcgcgaacgcccgcgtcgctttttacagctacgataaatctgtttgatgtttttgcgttctccttcaaattcatatttgattttggagctaactttaaccatggcaattacatccagcttcctttgcttgagctggacgatttgatgtggatttgagaaccagctgtcaaacagcacgtacttggcttgatgacctgctttcatagcttggtcgattaaattaaccatcacgtctgtgcctttagtccgggcaagcatgcgtcttttgccagcaatggtgcgctgatcacagactttgttttcgccaatcatattctgtagcttgtgagaggacagcaacaccgaattgattggcatgaaagaagctccatcagtccagcccagggtcatcatgcgaaaacctttcttgtaagtcattgatacatggtcaaaaactttggcgactaattctgttttcttgaagccggtcctagagaagtaggaatcatcgacaacaaagcaatcagcccgtttttctgaagtcaaagatcgcaagtgattattaatgatttgcgcagaaagcagtgtggtgaagtggagccaattgacgtggacgttgcgcataaatcggtaataagaatttttagaaaagctttctttaaaatgatccgttttcagctgcatatataagctgcggtcacgaaagacattgcttaaaacgtaaagaaacaagctgaacaggctaatgcctttttccttgcggaagccacattttctcaacagcttgatcacctgaaacttcttgatgaagctgatgattgagtttgaaaatagttgttcatttttttggtcaggagatggtaaaatagacattggcacaagcctttcatgcatagaattatcgtttggtcactttaattatagcaatgaaaaggtcatgtgccttttatatttgttaaaaaacgcagaatcacaataaaaggagcgattctgcgtgtgggaagtttaagtaattaaaaaatcaatttacgagaaagaactatttacacaaaagatttgacagtttctgaatttgacaagcaatatacagaaattatcaataaaaagtacgttttgctataccttttcataaacctgactacaatgagagttgaagaaggcgtttttgtatgacaaaagaatatgaaaaagaagtcaaagaagcagaaagcgtattggaggaccaaaagttaactgatagtgagatttcacaagaattgatttccaaagataatccaactgaaaatgtaaaaccatctgagattgatttcttgcgtaaaaagccaaatttgacaacgcaaattgatttcactttgttagctgatcttgctgggttatccaaggaagctaaggcagaagcggctgtatagataaaaattttacgtagaaaaagaagtcaaagaagcagaaagcgtattggaggaccaaaagttaactgatagtgagatttcacaagaattgatttccaaagataatccaactgaaaatgtaaaaccatctgagattgatttcttgcgtaaaaagccaaatttgacaacgcaaattgatttcactttgttagctgatcttgctgggttatccaaggaagctaaggcagaagcggctgtatagataaaaatttcacgtagaaaaaagaccggtttgaaccgatctttatcttataaaaatttactttaggagcgtttgtgaaacttagctactccccaactgattagatagaaagtcgaaatcaaaatgaattgaatttttaattctaaaatgaatagtggaaagtaaaataaaacggaaaacaatagaataatagcgtaaattccttcgaatgttagaaataatctgtttctttttctatttttaagtgttgctagtatcattttttcattcacaaagatccctcctaaaaattatgaaattaagaccaacttaaataaggaatagtccatcggataggaacacctaggagccaatgtccggagctgagaaaagtgttttttaacacaacggtagtaacaattgcaataactgcgagtactaccaataagattagtaatgtactttgtttaatttttgacatgattaatgcatcctcctaatattttttaaacttctattattttgctgggataatgaccggtaattgccaccacattactgtagcctcctcccttttttaatcatttagtcggtttggttaaatactactccttagtgactagaacagattaattttgtatcacatagtttacaaattatttgggccaagttttaattaaatcttgataaccatatttttgtacttcatttctaattttttgcgcttcctctttattgtttaaaaataaattctttaaatataaagcagcaatcttataaagcaaaaaatgtatggttggttttgattccatgatgtagtcaattatttttggaacatgcattaattgaagtgattttttagaaagttttctattatagcaaaccgctagataattctcgaagacacgcaagtatctttcttgttctaattcggagatatttttattgcttttcatctcgttaagtagtctattgataaaaaatgcaagggtatcttgttcccagagcggcattgtattagtaaaaagtcgcagtaattcaggattagtcatccagttttgtccttcgttaaattcaatgaatagatctttttttattttgggatcgatttgatttaatttattttttaaatatgctacagaaatcatagctcttaattttaaaatcttagagtgagattgtgacagaatttcttgatagcatgattcaatttcatcaatttttcctacattgaaggcttgttccattttattatttaaatctgattcaatctttttttgctttgaagtataggttgctcgcaataattggtaaaagtaagtaatatcaacatcatgttcaaaaagaatcgcggctaatttatctgcactaattctgctttttcccgcttctactttcgcataaaaaggccgagtaacaatgttagcagccatttctttttgagtgaggtctagattttgtctaatttttcgtagtgcttgtccaatagtcataaaaaatcctttactctaaaatattttcttctctacgatatatgattattataaatgatgaaaatataagcggataaattaaagagaactatggatatcggaacggcattaagacatttgagagatgatctaggtttgacacaaaagcaaatgattcaggggacgaaaataactgttagtcactattctaaattagagaagggacaaaacaggatatttatcgaaaacctagtcgagatattgaagcaacgaaatatttctttatcatattttgttgatcactatcttaatgatgaaaatagtgaaaaagaagtaaattattcagaaatattaaatattgctttttacgaaaaagataagatcgctgctgaagaaataaaacgacaaattttttcagataagagttctagcaatgaattgagagatagagcaacattaattgtggatatgatagacaaccagggacagagtaatgttgatgctcgaatcattaattctattttcaaacatgacaactggactcagtatgacgaggcaataatattattgggtaatattattagaactagtaatgtcccggatttaaaattgaagtgcaacactaagtgttaaacaaaaaggccatgaagacctaaacttgaagtgacgaaaaatcaagaaaggaagatctttatgaccaattcaaattctagcatttctaagcactatcatcaattaaccagcgtacaacgtggacaaattcaagcaatgctggattccggcataacttcccgtactgttatcgctcaagaagtcggctgccataagtcgacaatcagtcgcgaaatcaaacgcggaagtgtcctgcaaagagacagcagctatttattgtatgagcactattacgctgatactgcacagatttattatgagaagcgtcgcaaaaactgctatcagcgcaatccattgaagcattatgctgtctttttgagaatgctctccagacgctttaaagctaaatttgatgccaccagcatcgatgaattcgttggtgaattcaaaaggactatgccaggctacccttgtcccagcacaccaactgtctatcgctatattgatcagggcttgctggacataagcaatattgatctgcctatgaagctcaaaagacgcaggaacaagcgtcatcacggccatagcggtcatgctttgcacaagaagcatcttggcaattccattgaacagcgtcctaaagagattgaagacagaaaaacgccgctgcactgggaaggagatctggttaaaggcgtcagacgcaagaatcagcctgctttaatgactttgaccgaaagaaccacacgctttgaagtagttatcaagattcctgactatcgggcaagcacatgccaaaggctgcttcaaaatgagattgacagacatcctgcctggtttaaatcgatcacgtttgacaatggctctgagtttgcggatatgaccaagatcaaaggctgccagatctacttcgcccacccatattctccatgggaaagaggcaccaatgagaactgcaatggacttctgcgtcaattcttccctaaaggcaaaagcatgaaagataagtcagctgcttatgttcaacaggcaactgatgccattaaccgcaaacatcgtcgaatccttcaatatcacacagcagaagaactcttcaagcaatatatttcctcatagcctaactgttgcacttaatttgacaattcagggaactagtaatgtattaaatatgagtcctttggtattgactctaattagaaaatataaagatctagataaagaaaaaatcgaaaaacaaagaaggttagcaacggttggaattaattatttatttaattttcgaaagttaagtaaagagtttaataaaactgtgctaaaaattataagctggattaaaacaacatcgattgttcctgagttaggcattattcgagaattaaatgcatattttttagcagtttatgaaggaaacatttctgtctcaactaatatcaaaaatgtccttaaaatatcaggttatcaaaatcttgctaatgatttacctaattaatcccctgagaggggattgagttgctgtggaatgagaagtagataaaatcatagttaattaaatatgaaagagaggcatagtaatttgattattgttagttatccagttttacctgaataactctgagttcatacagtacgaggagatataaattatgaaaaaaagattttgttaagcctaagtttagtagtattaggaaatactttgttttttaattcgagtgtagcttctgcagcgactaataatagatattccgtaaataatacaattcgtcaggcacctaatactggcgatgttcctggtggatggggcattactcctggtcatacacattggggctaagtgatagaagcgatgaatgaattttcattgctctttttattttgggatgcgaattttatgaagaaaagtaaaatcatatttttaatagagcttgtattaaatattattgctgctgtttttctagtaataaataattcattcaaaaatttattagatgtaggcgttgtatttttactacttctattgcttatttggaattttttaagaagaaaaattgagattagtttaaaactatcatggctcaatcttatgatattaccagcaatttttacttattgcttaaatactgtagctaatgttttattggtaaaatatcctgttaaaagtgttttaatagctataatttatagtttgttattcttagtttatttgcttccggtagtaattactaatgcgggattggttaagaataagtatgctagagtttttattgcaatgtattatattgtgctattactttttagcgaaaacttacatatgaatgactacttatcatcctttgtaaattggtctcactctgaaattcttaatgggttagcgttaattccaatcatattttgcttatttaaaagttgggatattcgagcaaagcttaatcttaaatttaggcgatattcaaatatacagttaatagttttattagtagctgtattctttgctgcttggtattccttctttcatagctatgtttatattgcaccaactttttcgcaattattttggaattgggacttctcggaaattatcccaactgaacgagctgttttatggagtttaggagcgattttattcgaagaaggattccggtatctattaataattgtattgcttgaagtttttaaagtgcaaaggggtcaaattgactattttcttgagtgcgctattttttggattgatacattatgccggactacttgaccaaggcccaatatttataatttcaacgcaagcaatttttgcttttggttatggctgctttttggcgacactgtacttatattctggaaaattctggttagtattgctttcacatttttcattagatcttattgcattctcgctttctgcaggtggtggcggaatactatcatggtatggcaataatgatctcttgagtaatggtttgagcatggtttttgctttagttatgacattgattatgtttttaggtaaacaaaggaaaattatgcaagaaaatgctgctagattaattaatgcatgatgcatttaagatggtcgaaagatcatcttttttatgcaataaagtgtcatatataattgacacctactataaaagttgctattattttaaaaacgtcacatataaatgacatctaactagatgaataaagaagaattcaatgaatcgagtaagagaatatcgtaagcaaaagcaaatatcacaaatggagcttgctagacgaataggggtggcaaggcaaaccattaatttgattgagaatgataagtataatccatcgttagaattatgcctaaacttggcgcatgcattaggaacggatttgaatactttgttttgggatggggatgaagcaaaatgagacgagaaagtttatggcttaagtttgtcagatattggtatggcattgatagtaaattagacgagcggcaattagcagaggttgaacgaatcggtaataatgcctatgtaatctctggtatagtggaactgatcttactggttatcacgctaattatggcattgactattaaaagtgagctggctttgtggtttttacctttggcgattgcaattatgatgctgatgatgagtgcttatacttatttgacaatgcgaaaatttaaaatattctctgtcgaaattacagcagatgaacgccccaaagcaattcgtagaatatggataaaggctataatagcgggaataattggtgcagtttttggtacattaggtagcgcgctaggagcttcttctgtgcaaaataatctagtaaatgtgcttgatttttggccacaaggtttatggctaggcgtatgttgcggtgctggtagtgcgattggaagagtgcaacgattgaaagtaattaaagaagacgaataagcgaatcgaaagtagtcgatccgctttttttgctgaaaaactatataattaaagtaacaataaaatttacagcaaggcaaaaaggatgaaaaaacaaaataagactggctcaattggcgtagtgggtgccacggccatcggtgttggtggcatgatgggagcaggcctatatacattgctcggcttggccgccaactctgctggtgtttggctgccagtatcatttctaattggaggcattgtggccgcattttcagtttattcgtattcaaagttaggaatgaagtatccagatcgaggcggtgccgctaagtttttgctaaaagaattcggagatggcctgctagctggtgggatgaacgtcttccagtatatcggctggattatcgccatggcgttatatgcgaccggatttgcggaatatgcctgccaactattgggaaaatcaagctcaggctggctaggtaaggcaatcagtatcggaattgtcatcgtggttgtggcaattaatattatgggttcaaagcaagtggcacgtgcgcaaacggcaattattgcgtttgaattgttaatcttactgtcttttgtagcggtaggtttaactaagctgcatgtgccgacaattactagttcaaatagcggcaatattgtaggtatcctatctgctgcgggtttactttacgtaacttatgaaggttttggcgtagttactaacgctgcagggagtatggtaaatcctaaaaagcagttgccacaagcgctgttcttttcattagggatcgtcatggtgatttacattgtagctagtgtagtcgtggtgatgaccttaggcgttcaaggcgcagtagctaatcaaggccacgttttggcaacggctggtaagctagtattaggcaactggggtctgttcatcacttcactgattgtctgcatcttcgttgtgattttcccattatcagctgttggtgagatggccagcctagcctttttattggtgtatgccatggttaacttaggccacttgcgcattgcaggacaaactggggccaagcgctggattttgatttgctctgttgtattgaatctagctttgtttgctttgttgtttattcagacaattctcaaccacgaaactttaacttggatttcagtaattgctttgttaattattagttttttagttgaacttgcttggcgaaaaaagaataaacgcaacctgcattgattaggaaaaaaatagtaatttatgatacaaaaagtcgacttttgttccacttattgggtacaaaagtcggctttttgtttttttcgttgtcaaaacaatatctttaatattttaattcagatatactctctttgatcaagtttgaagtgagggaaaatgaatgaaaaagttattgatcggaagcgcagtcttagctgccttattaattaaagaaaatatcgcagtaaatgcggcaatagagcaaaacgaaacaacgcctaagattgcagttactgacaaaaaagagaagccaaaagaccagtctgataatagttttgcaggtcattatgaccaagagacaaattttattacctgggaaataaggctgaatcccaagaaagaaaaatatactggtgatttgaagttggaaaatttaattccagaaggcttagttctagatccagatacgattgaagtaattaagaatgataattttattcaaaattctagtttagttaaattgaagaaaaacaaattaacagctgaatttcctgctaagaagtattcagagagcacaattttgattaagtatcgaaccaaggtggaagcagagcctaatgagcctaattatcttcgggtgagtcagtcctttactttgggcgatgatcgagttcaagaatacgagcaagaaattaaatacgatcgaagtaataagaattttaacattgaagcgccacataaatctacgtttagagatgataatcaaatttcgttaattaaaaaatctaaaagtaatgaagaacgctctgaagattggcttaaacgtctagcagagctgattattaataaaaaagaaactacttcagataaaggaggtgaaaaagttcaaggacaggtcaaagatcaaaagcagcaagcttccccagaaaatacaaacctttcacgcactccaactgtcaaaggcttgactggttttgatactaaggctaacgaggtaaaatccacagctaaaatagattctgattcagtaaaaactactctagataaagacgagattaaggacaatgcaagtactatctcgcctaagtcgcaaaaacacgatactcatgtcacactccctaaaagtgacacatcagaaactaaggcaaaattacctaaagctggtgaaactgccggtgttatgctcagcgtattgggcataattttaataattgcagggtggacagttcgaacaaaattcttaaaataatctatatttgtactaaaatacggattttcaatagccaaaatagactctttcacgtattatttagatagataaacttgtatcatgaaagagaaacaaacatgccgtacactatttcagaaattattgttttattttttacttattcagttatcggctggctttgggaaaccttttattgttcgatcaaagaccaccattatgattatcggggatttctgtttggtccttactgccccgtatatgggttcgccgttactacaattttaatttgtaccaaagacgtgcgagataacctgctccttttatttatagtagggactatcgttgccactattttcgaatttgtggctagttggctattagagacaatctttcacatgaagctttggaattattcaaaattatggggtaacattcaaggtcgagtggccccaatgatttcattattttggggcgttggtgtagttttattagtaaaatttattcagccaatcattcagaagctcattaataatgaagaaaagataactcatggctggctagctgtgggtattaccattgttatgggtattgacttagtattaacagtaatcagtgtcgagagattccatactacaactaagatgtgggatgtgcatattaaccactttattgagcgagttagaactaaagtagaaagtcatatgcctgagaaaggaaaattgcgggttggtgattggcaccactcagtgatgcagcactatgatgaattacaaccgcaacgattaagctggaatcataagcgctacttgaagagctttccaaaattaaaagttactgatgctcctaagttcatggaaattaagaaagaagtcttgaagaaagaaagctaactaacataatcttattttgtgggattgaaaaaagtcggatgatcatattaggtcatccgactttttcttatccattaattctatttggttcacgttttttactttttatttcggtgtagttatctaaaacgttggcatagcgtccaagggtgaaaaggtaatcagataatcgattgaggtattttaatacgtcatctgataattcctgttcatttaaacttaatttgaccaatataatagcaacaccatcaactcctgaaactactgaagaagaacatctgacagtaaaagatcatgtgggttcatcaactttaagaagaggattaccacaaactggtgaaaagaaatctactttgaatgcaggctttgcccttgctggcataggcttggctttgcttgcagggatgttgtttgatcctaaaaagaagcactaatactgaataagaattaagttcgttaaagatcgaatcattttgggttcgatcttttttagtaacaaaatttaaaaaatcccaccttcgtgaataattgaatactttatatatttcaatcgtccactttagtgggattgtattaattcaggatgatctttttgaatttcctgtttttgaagggcagaccaagtccatggaagagttttttataggcaaggcttggcataaagcctatgataccattgattccgatacagatagagtcattaagagaactaaaatggatgctcgtactacgttagacctactagaacatctatcacctgtacagttctcttgaagagaaaaagaatatcagcacgtcaccagtatggttcttagactatgatcaaaaaatttattgtactgatgatgccatcattggtcagatgcttcaaaccattaatcatgacattacccgacgcagcagtcgtagcttattacactggaaaattcttaaacaaaattgttccagaaatttttatttttgatggatgttattttttgctcggttctaagcgattttatttatcaaagttaatagttctatgttatattataagtgttataataatgtaaaaattattaagcattgaaatatagtgcattatgatacgaggagaaagatcatgttagaaagagtcccaaaatatacactaagaaaactgtcagttggcttggcctcagtgatgattggatcaggaatactgatgaactctccaaaggtacttgctgatactattaacccaaatgaaggtactagtactgctgttcaaccttctagtcaagataaagataatagtgagccaagtactcaatctggtgctactcaagatgaaaacattgattctaacgcagctgttcaagagagaagcgacaactcagttactgaaccagcaaccacaactaatgctgaagaaaaagtagtggcaacaaatacccaagatactacgcaagataaagacaagcagacaaatgcgaatgaaactacgcaaaatactaccaatgtcgacaaaaaagatactgaagtaacgccgactaacgacgcaacaacagctacaccgaagacaaccgccaaggttaacgcaccggctgcaccaacagcaatgaaggcagcagctactgctgaaacaccagatccaacggttccagataactcagctaatactgctattatcaatgacaagaatagtttggaaaaaatttggcttgaaacatctactgcgcgggcccaggtctacactaccgttaagggaactgatcaaaaagtctatgtcagttcctatgcagaattcggtaagcgacttaattcattaatttttactaatcgctttgatccaaatagtctagaattacacattgaatatcaggtgttaaaggatagggttcaaaatttcattgtaaattggggagactggctccgactagataccagtagaattggtaaagatggtctaactttcactacagatacaggtgaaaaagtagcctatacgttaacaccaggatggggggaagtacaaaacctatgatgaatggcttagtgaaggccaagatatgagtaagataaatgctcttaaaattggcaacaatttaaaggccgggactaacttcgtattaaccgttcccctaaaatatattggtagaactgatggcacaaagcaatttaacaatgttcaagttgtagattacgggcagccaaatgctaatatggtgttcgattttattgaattacatccagagcaaatcgatactccagaagctccaactactgataaagagtcagttactaccggtatctataacaatccgttagctactgctacagactggtataaaacggagcatggtgaatatgttgcatactatacagctaaagggaaagatggtaagacctatgtaactggatatgtggctgccaatggtaagtctgagtcgattatcaatgttgatcagattgatctaaataccttggaataccatatgatttaccgtaatggtgacgaagaagtagcggccggtatttcagcaagctttgctgatggtaagactctagtggttgatgctagtcgtataggtgctgatggtatccgtttgaagagtcaacagggttggtcttataacaacgggggttatagagagaatactagtgggagactctattatagttgggaagattttcttaagaaccataacggatcggtagataacctcgttggcatcaatatgaatgcattcgctttcaagccgggcgatacaattgaagtagttgttcctgttaggtatattgggaaactttctgatcaagttcaatccttagaatttaaatctgaagctagaaaagatgtttcggttaaactctacttcacaactgtgcgcaaggacttaagccaggttaagcaggtagtcttgcttccgactgagttcatgggagaacaacctggtcaatcaaactggaagctggttaaggaaattgaaaaagatatgccaaatgggtgggaggccattaaaattagtaacttcccaacctataagggatcattcaatatggattcactaccaaaaggggacttaccatcggttgtttatggctctgcgcaatactttgttgacctccaagaaattcagaaaatttttgctaaccatggttacacggtcaagtatgctaacaacaacggtaaagctcaggaaatgccattctatggatacgttaccctgccactggcccttattgatggtggtggtaaacctgttgccccatctatctggacaatccaagttcaagctgtgcctgctattattttaaataaagatcaacactatgtggcagatccgaatgctaagccatgggacaccacttcaatgattgatgagatttatgctgctgatgacgcaggacagcggaagacgcgcgatcaactagaaaagttgccaaagacggacgtggatattagttatgaataccaagctccaggggctgctacagctgctccggttgataaggtcgacttgactaaggcgggggtatacactgtcacttacagtcatacttatgctgatgggcgagtagttaaggatagtcgcaaggtttatgttgatgatgttaagcaagaaaccaaggacattactcgaacaattattgtccacgagccaaacggaactgaccaaacagttatccaaaaagcaacattgacacggaaagtaattcttgatgcaactactggggaaatcaaatctgtgggtggatggtctactgctaagtgggaaagatactcagctccagaatttaaaggttacactccagccccggctcaaattgatgaaactgctgtgaacaaggacactcaggatacaactgttgagattagctatacagctaatgagatcacaaagccagaaaccaaggacattactcgaacaattattgtccacgagccaaacggaactgaccaaaaagttatccaaaaagcaacattgacacgggaagtgattctttatgcacctactgggaaaatcaaatctgtgggtgaatggtctactgctaagtgggaaagatactcagctccagaatttgaagattacactccagccccagctcaaattgatgaaactgctgtgaacaaggacactcaggatacaactgttgagattagctatacagctaatgagatcacaaagccagaaaccaaggacattactcgaacaattattgtccacacgccaagcggaactgaccaaaaagttatccaaaaagcaacattgacacgggaagtgattctttatgcacctactgggaaaatcaaatctgtgggtgaatggtctactgctaagtgggaaagatactcagctccagaatttaaaggttacactccagccccagctcaaattgatgaaactactgtgaacgagaacactcaggatacaactgttgagattagctatacagctaatgagaccccagagcaaccagataacagcaaggacaaaggtaataatgacaacaatggtggtaacaattcagatgcgattgtgccaataaatcctagtgacaataactcaaataattcaaataatgcaccaactgacaataagaagactgatgacaccaagaaagataatactggcaagaagattacaaaggagactcctaagaaggtaaagaataataagtctaacaagaccaaatcaacgactacttctaaatctaaccagtcttcaaaggctaagcgaaccactaaatctggtacgattagtcctaaggcagtcgctttagctaatactactgctggtctagctacttcagctaaggcaaatatggaaaacggtattgccaagaacaacagccaaaattctcaaactttgccacagactggtgaaaatgaaagtaaggtagcatttgccgttgccgggttgttagcagctgctttgggcatttttggtatagctattaatcataaaaaagaaaattaattagctaagttgaataaatcatacaaaaagacgcatagaatagcaatgtcattaagttaagacattgacgaaaatcagactttatgaaccgaattattttggctctttgtcaaacaccctaaagtataaaggtagatagaaacatgacgatgtttttatctaccttttttcttatacttagattgagcttgcggttgaacccttcaaggcagccgttagaataaggcagttttgctccattaagcacagcttttaggttatgtttaaaggtcaatagtgttttgtgcattaaagtcccaatttgatcttggcagttgattaataagttgagctcatgagtattgcccgtttcaacggcttgaataaagctttgcatcaggttatatgaattctctaaggtagtgctggtattgatgccttctgtaactacttgtgcttgagttaagcagtctttgtagtgccagttatagtgaggatgaactttttcaagttcatcaaacttcttcaagtataatttccaaggagacttaagcagctgatattgccgcgatcttttatcaaaggtcttcatgacttggaccctcagcgagttgaatgagcgcgtaagcatttgaatcatgtgaaaacgatcaatgacaatctgtgcattaggaaaacaagctctaacgatatcttgatagtaaaaattaagatccatcgtgaccgttttaacgttagctctagcttggagcgagaaacgaccaaaatacttaagcagcgtcttcttgtagcgagttctaagaatctgaacgacttgatgattatcaccatccaggcagataaagtgcagctggcggtaactcatcaaaagctaaatgagctggcaaatattcgtagctgtcaataaaccggtgtgaacagttgcccagtactctttgaacagtattaattgaaatattgttttctctggcaatgctggtcatagatcgatcttcagttaaagctgacaacactttaagcttagaggcattagaaatagaacagtatttaccaattcagactgagccatagatcagcgctcacaagtgcgacatttaactcgttgcttagctaatcttataatgaccggtaagcttgcattagctgtcggatagtgaatgttggtaatcaaatggccattatgtaagagatctagggagccgcagaaaggacaagcaggttgaagcaattcagcttcatagattttatgcttttgcagtttgatcgatttatagaaatcacctttatttataagaatttgtgtggaaacgatttttattgaagaggactatgtcctctttttttcaataaaaaatcctgttaacagcttatcatatagataagtcatcaacaggaaaaattatagagccaatattttgagattaattgataggggttgaaaagtaaattttatttgttatagaaaatatagaaaaaggattgttcaagaaattattttacgaaacctgcagtgaaccaagtgttggcactaggcttaagtgaccagccagtgaccttcttgttaacagcagtgattgagtattggttggtagttggcacaacgtatgcttcatcatacatccacttttgccacttcttgaaggcattagcacggtaagtaggattgaaggccttctctgagtcgatatcagccaaaagcttagtttgcttaggtgaaacgaaacgagcaaagttgtatggtgcagcttcattgtaaaggtcgttaggggatggttcacttgaaagtgaccaaccaccttcgaagacgtcgattcttggatcgtcagattgaacagcttgtacccagttgttgaattccattggacggccgccgacaaatttaacatccaaaccaactttcttccattgttggatgtagtttctccaaacaggttcagcggtagttgagttgtttctaacagccaagttaattactaacttcttgccgttaggttgaactctgtattcacccttcttcttgtagccggctttatccaataattcgttagccttcttcaagttgtatgggtaacccttgattgacttgtcagtataatcaccaaattgttcagggatcaaagtgttaacgcggaaggccaagccgtggtagtaacgtttagcgactgcatcaacgttcattgcataagccattgccttacgcaatgatggattgtccatcttggagttcttgttttcaacgttcttgccagacttcttatcccatttacctaccttaaagcctaagtagttgtaggataggggaaccttaccaatgaagttggtatcagtagcgttcttaacatcatcccattgggtgttaactacgccagctacgtcgaacttgtgactcttgatggcttgagtaactgagttggtaccgatgactgtcatggataccttttccaagtttggtgtaccacgccagtaatgcgggttacgttcccaagtgacagattgaccacgaacaagcttgcttacgcggaatgggccgtagaagagtggttgttttctaaccttgtcactagacatcaacttggagaatggtacgtcctttaagtaatggtaaggttcagcgtattcctagaagtaaccgttacctgattgaagcataccaggcttcatttgtttaaagtgaattacgaccttgcggccatcttcgccatcaggcatctcaataccagaaatcttcttgctcttgccttcgtgatattctgctaaaccaacaatgtcggcaagagaatcggtataacgttgtgacttggagtctttattagcgataatttcataagcgtattccacgtctttagcattaacttgcttgccgtctgcccacttaacacccttcttaacctcgatagttacggtcttggctttacggtcaagcttaaaggtagcagcacctttattgttaatcttgtattgatcgttgactgagaataacccttcttgtcctggctctgcaacttcactgtcagtggcagtatcagataattctggcaagaaaataccagtgaagggactatcagattcgatagcataatttaaagtgccaccttttttaacacttttcacaggaacagtttgactgaatttgtgatgtgtttcatctgcattattattttttgaatttttattattaccacaggcaaccaaacttaaagctgccccagaaacaagtgctaatgcaccaaaatatcgttttgctttactcattcaaaaagcacctccaaataaattaaaaatatttgagttttattctatgatattaaaatgaaaaaaacaatagaaagatgaataaaaatgtgaaaaatattatttttaaattatttttgaagctaagattagttttctttcttggctaattaggcatagaataaggaaataacagctttttatgttggaggaaaatatggatacagcctggcaaaaatttaaaaataatattccattacgtcgatttgtggtactgctattaattattgcctgcctttatgaaatacgagcaatgatgaacacagtattattaacttttatttttacttatgtgatcgtgcatttaattcatctagtgcagcggtattttcctaaaataccaacaggcctaattgttgcggtaacatatctaattatcttggcgctactttatttcgtggttaccatttatttgcccatgttagttggccaaatatctaaaatggtaaagtcagtgatggcgttttatgaatcaaatgaatcatcgcgcttagccagccatgtaacgcgttatatcagtaaaggtgagattgttacgcaggcaaaacgagttgggacttttgctctgcatacggtgaccaattttggtagtttaacaattgctacctttatgtcattgattttgagtttcttctatacgattgaattagatagaatgattgaattttcaaagttatttgttaaaagtggttactttaaatggctttttgaggatattcgctattttggtaaaaagtttaccaatacttttggtgtcgttttagaggcgcaattctttattgccatttgtaatacggccttgacgatgattggtctggcatttatgcatatgccgcaaattattgccttaggcttaatggtctttattttaagtttagtgccagtagctggtgtgatcatttctttaattccattaagtattatcggctattctgttggtggcattcgttatgtgatttatatcttcattatgatcatgattattcatgcaattgaggcctatgtgttgaatcccaaatttatggctagcaagactgaattaccaattttctatacttttttagttttgttagtagctgaacacttctggggtacttggggcttgattgttggtgtaccgatcttcactttcttgcttgatgtcttagggattaaatcggcgaagaaaagtaaaaagaaagcgaataaataatgagagtacttttgacaggtgatagcattattgcacgccaggaaggaaaaaatgaaccgcatcttaattggaatttgcaccaattattgccagatattgaaatagaaaataccgctgtttcggggattaactccggggccttttttgccaaattaaatgaattagtactaagcgtaaagcagtgcgataatttggtgatcttgctgggaaccaatgatttggctatgcacaaacaagtgccagcaaggcaatttaagcaaaatatggaaattatttcctcggcaataatttgtcaatattacccaccacatgttctgcttgtttcgccgccagctgttgatgaagctaagcaacgtgtacggaataatacgttagtagcggaatatgctcagatcgtgaaagaagtagcacatgagtatcattttcgttatgcagatctggcacaagctatgcgggatactggcgatttaagcgagatttgtcaaggagtaaaaaacgatggacttcattttggtgatcgtggctatgagattttaggaaaactaattgctgaaaatttgaaacaaatgtaaaaaggaccgcaatttgcggtcctttatttttcgctattttaatgttgcccaaagcaagcttccagctagcgcaatggccaagaacggaatgagcaaataggcaaaaaagaaaaacataattcctacgactagtaaaaagccgataattttaatgaggccaattcctaatttaaagaatagccagagtaagagtaatgttaataataaagaaagcatattaatacctccataaatctatgagagtattttactaccaaattggacgaatagaatagtaggaagattaatgctttagaaaaatttagttaccggtaacaagataaattatattgaaagctctttctgtaaccgctatattttaactattgaaagcgatttaagaaacgagaggaaaaataaatggaggagaaaaaaactgggttacctacgctagctagtacgacaatttggatgattagtttggggtatttgggtgtgcaaatcgcctttactttggaaacatcacagatgagtcgaatcttccaaacattgggtgctgatccgacaaaattaggctggttctttattttaccgccgttagctggattggtagtgcaacctggaattggatcattatccgatcgaacttggattcctaagattggacggcgtttgccatatttattagtcggtatgatctttgccgtaattactatgattttgttaccaaatgttggtagttttggtctaggctatggttcaattgaggctctaatatttggtgctgttgcaatcgcgatattagacgtggcatcgaacatggcaatgcaaccatttaaaatgatgattggtgacatggtcaatgatgaacaaaagtcatatgcctatgggattcaaagcatgttgtccaactttggtgctgttattgccgcatttttcccgttcttattaactagtttgggtgttgctaatactgctaaaaagggtgtggtaccacaatcagtaattatttcattttatgttggtgctgccgttttagtcattacatcattgttcacgatattcagagtacatgaatatgatccagaaacctacgctcgttatcatggaattaaagaatctgataatcaagaaggcggtggttggattgaactgcttaagaaggcgccaaaagtcttctggcaagtgtcattagttcagttcttctgctggatttctttccaatatttatcaacttacgctactggtgctattgcacaaaatgtttggaatacgaccaatgcctcctctgcaggctaccagattgctggtaactggtttggtgttttaactgctgtacaatcaattgcggcagtagtttggtcatatgttttagcgaaggttccaaataatcaccacaagctaggttacggtatcagtttgctactaggtggagtaggatatacttcaatcttcttgattcattctcaggggtttttaattctatccttcattttaattggtatcagttgggctggtatgaatacttatccattgacgatggtatctaatgctttatcaggtaaacacatgggaacatacttaggattgttcaattgctcaatctgcttacctcaaattgtagcatcactgctcagcttcatgattttcccaatggtgggtaactccatgccagcaatgatgttgattactggtatttcaggcttcttaggcgctttatcagttttagcaattaaggaaacctacgtaaaatagcataatttttccgataaaaaaacactgcgtgcattgtcaatgtcattaagttaagctattgacattggagaaaaaacaattaaagcatcatttggctttagatagccaatttgatgcttttttgtgtacgccaaataagcgtagtttgtatttcttttttattaggccacgcgatacatgtaatatactgcagacttggcttttaaatttcgtttgtcttttcgcctttatttttgcaaaaaaaagaatcgaatccaaatgattcaattcctaaaaagatcagttttcaaaagtcaatagcttaacttaatgacattgcattttgaataactgcggagatttttggtataagtcccttaacgatgacctcggctcttattataataagaaaatccgcaaattcacagtgttcatattatagctgtcgttcactcttaacttataatcctaaaataacgttctaatctgtgaagtattgcagaatatcctcctcagttaggcgttttttgtcgtcgcctttgacatcaaaaacgattctaccattgtttaaaatgatagtgcggtttccgtatttgattgcgtcttttaattggtgagtgatcatgacacaggttaaatgctcttcttgcacaactttatcagttagttcaagcaattcgcggctagtatttggatctaacgccgcagtatgctcatctagtaagagtaaatcagggcgcttaattgtcgccattaaaaaacttaatgtttgtcgctgaccaccagaaagattacccacaaaagtatttaagcgttcatttaacccattagggagttgggccgcctggcgtttaaattcttgcatatgtttatctaggcctcttaaacgcagaccgcggtgttcacctcgtttggttgcaagtaataggttttctgcaacagtcattcgcggagctgtacccattttaggatcttggaatacttgggcaatatatttagcgcgttttacttcagaaagattggttaaatcttggtctttgagcagaatttttccgctagtaggaaaaatagagccattgataatatttagtagcgttgatttaccagcaccgttggttcctaaaagagtaacaaaatctccatcttcaagttttaaattgatgtttttgaggatttgcttttcctcattggtaccagcattaacagtagtagtaatattttgtaaatcaagaatagtactcatggtttttcaacgcctttctttaataacttacgagtgcggaatttttgttcaaataatggaagcatcatgcaaatagcaagaataatagcggaaatcaatttaaagtcgttggtactaaagccaagttggaggactaggagtaagataaggcgataaataatactgccgataacaactgctaccaagcgggcggttaaacttaaattaccataaacgacttcaccaataatgatggcagctagtccgataaccatagtaccaatacccatattaacgtcagcgtaaccaccgttttgggctaataatccaccagctaagccgatcaagccattagaaagcattagacctaagattttcatattatcggtattgatcccaagagattgggccattttttcgttgtcaccagtggcaataaaggcttgaccaagatcagtatcaaggaaaactgctagcaaaacgatgacgataatggcaatgatcaaaccaacaacaatagtaggaaaattgatcggtaatttttgtaaaagctgaccgtttagtaaagtatttttgttaagtaaaccaacattagccttgcctagaattctaagattaactgagtagacgccagtcatcgttaaaataccagctaaaagaacaggaatttttcctttagtatatagtaagccggttactaagccagtgaccatgccagcgaagaaggaaagaatggtagctgctaaaggattgacgccatgaactaaagcactaacacaaattgcggcaccgaaggggaaggttccttcaacagtcatgtctgggaaatttaaaattctaaaagttaggtagaggcctaaggctaaaataccccagagtaagccttggccaatagaagaagtaattaagctcatttgataattcgtcctttcttttgggcagcttgaattacactgttaggaatagtgatgtttaattcatgtgctgctttttcattgattactgtttcataatgggttacgcgtctgactggaagagcagcagggtttttaccatgtaaaatttgtcctgccatttgtccagttaagattcccatgtcgaattgactgacacacctggtagcgagaccaccacttttaaccatagtatcggcagcaggaaaaactgggatcttggcactgttagtagcctttaataaggtggcaattccactagctacagtattgtcggttgggacataaactgcttgaaccttgcctaccatggtttgggcaacttgttcgatatcattggttgaagtgatagtgtaagggataactttaagtcctgttgcttcagctagtcgtctgaattcacggtactctgatgctgatgaatcatcacttgaggtgtaaatgacaccgatgtttttggctttaggtagaatttcttgcattaaggccagctggctggcgattggctggcggtcctggacaccggtaattttaccgccgggatgcgctaggctttttactaaatgggccccaagaggatcgctgaccgcgcccataactacagggatgttgccagaagtattagctagagattggacagcaggagtggcaattccaatagttacagtcgcattttcctggctaaaacgatcgctcattgatttcagattactttgatcacctggggcattttgaaaatcaattttaagattttttcctttgacatagccttcatctttgagaccctgaataattcctcgatgaatctgatctagagcggggtggctcattgtttgcaagataccgacagttggcgttttcttttccgcatttttcttatttacttcactgacaaatgcaactgccagaaaagcaaaaagagcaataattgttccgattaaccttttcattctttttctccttcaaacaaaaaaggcacttccttttttcgggaaatgcctaaaacaaaacccgcacgttattttccgtgcgagcaatatttcttgaagattttaccagcacagatacgatcttaatgagtcgcatctgtacttcacgaacagaaacaactctagtgctggaattgccaacgattgattgctgtaaatttaatcatgataaaatcttcctttcgttcaaatttgttagctaaattttaagtaattatgagaaagatgtcaaatgattttttgttagatttatttagttttgaataatttttaaaatgctataataattattccggcaaccatcataaaaagaagggaggaattctcttgcgctatcaacaaataatttttgatgtagatgacacaattatcgattttgcggcaactgaagattttgctttacatagcttgtttaacgctcatcactggcctttatctgcggaattgcagcggcagtatcattcttataatcaaggactttggcgccaacttgaacaaggtgaactaacttatgaagagttaagtgaaatgacttttcatgattttattttggatcattttggcattgagattgatggcaagaaggcaatggatgaatatcgttcatactttggtgaagcacaccaattattgcctggggttgaagatacgttgaaatttgctaaaaagcagggctataagctgaccgttttgagcaatggtgaaaaatttatgcaaaatcaccggttggagcttgctggggtgaaaaaatattttgacttaattgttacgtcagaggaagcccattattctaagcctaatcttcatgcctttgactatttcttcagtcgaactgagatcggtcctagtgagacagtcttttttggggacggcctacaatctgatattttaggtgcagaaaaatatggctttgatagtatttggtacaatcatcgccatcgtaaaaataccttgcatttgcatcctaagtttgtagtagaaacttatccagaattggttaaattaatgcagaatgattttgagaagaagtactaatcattatactttttgctcttcaagaagatgccccaaccaatagttaataagctgacaaaaattattaaaatccaaaagccgttttcattttctttacctggtaagccgccgacattcatgccccaaatgccactgattaaagcgggaagagcaattaccagggcagctgaatctagatatttcattaaatgatttaggtgactgtccatcatggcggtaaagaggccgctaatggaattgagcaagtcagtgtaaacgtgaatcattttggtaattcgtttttgcttggtcatgatacttttgacgcgggcttgatttgctagcttgttttctactaaataattaccaaattcttctagactaggtgtttgatcatctaaggtatgctttaagtaaactagctggcgagttaaatctgttactttttttaattctttggtcttagttgttcttcttgcagcttgatctaaatggtcaattttttgtttaattgttactaattctgcatgaagatgcttgatttggatacacaggctttgaaaaattgtttcaataatattttcttgcggttttaattctgaaagacttcttgttgtgccaataaagagatgattttggtcaaaaattgtaaaaattggaattagctcttgttcaattggcaagtcattacttaatagatcgaaactcactaataagtgaccattttttagtttattagaatcaatagggataaaacgagcaacctcaatcgaggaattagggtaagtgaaaattgtaggatctagatcccattttttgattaaatgatcgatatcgttttgcgtcaattgatcttttaaaattatattctgactattagtaagcatatttgttcacctctgtttcttttttagtttaagattaacatgtaatgttttttagactgaattaagttgacttgaaaatatgtttttttaaaaaatatagaaaggtgagaatatggaattacattcacttactgatacttatactttgaacaacggcgtaaaaattcctgtaattggtttcggtacttggcaaacaccaagtggagaagttgcaagagaatctgttgaagccgcacttgaggcgggataccgtcacatagatactgctgcagcttacggcaatgaagaaagtgttggcgaagcaattaaacgtagtggcgttaaccgccatgaattatttgtaactactaaattgtggaattccgatcatggttatgacaagactaaaaaggcaattgatactagtctagaaaaattagatttagactatcttgatctttacttaatccattggcctaatcctgtagctatgcgtgacaactgggcagagcttaacgctgaaagttggcaggcgatggaagaagcagtgaaggctggcaagattcgcgcaattggtgtatccaactttagaaagcatcacctggatgaattaatgaagactgctgaaattaagccggtagttaaccaaagttacttgaatccgagtgatttgcaaccggaagtaacggccgcaagcaagggatatgatttgcttaatgaggcttacagtcctttgggtacaggtggtttattaggcaatgaggtagttaatgcagttgctgaaaactatggtaaatcaccagctcaaatcttgattcgctggtccttacaacatggctttttgccattgccgaagtcagttcatcctaagtatattgcggctaatggtgatgtctttgactttgagattagtccagaagacatgaagaagttagatggtttacgtggtgcaagtaagttggctaatgatccggatgaggttaacttttaatttaatttggaataaagaaaattgaattatcacaagaagtatcttatttttgaagtaagatacttttttattaggtgagacaatgaagaaaattacaacaggaattgtagctcacgttgacgcgggcaaaacgactctttctgaggctctgctgtacaaggcaggaaatttgcggacgctaggaagagtagacaatggggatgcttttttagatacagatcaattggagaaaaaacgtggcattaccattttttctcatgaagctaaattaacgactgatgatttagaaattacgttgttggacacaccgggacacgttgatttcagtgcacaaacagaagaaacgctgagtgtacttgattatgctatcttggttatttcaattacagatggtgtaactagttatactcgcactttgtggcatttgctcaagcgatatcaggtaccagtttttatttttgtgaataaggttgatgcgataggcgctgatcgagggatggcgttggttgatattcaaaagaacttaagtgagagttgcgttgatttttcgaagattgatgatgaattttatgaaaatgtggctgccacagatgatgccttgcttgagaagtatttggatagtggtgccatttatgatcaggacgtgcagaatgcaattgtgcagcggaaagtttttccaatttattttggttctgcgttgaaattaacgggaattacggaatttttagctggttttagtaaatggactaaggaaaaggaattctctgataagtttgcggcacggtgctttaagatttcgcatgatactaaaggtgaacgcttaacttggttgcgaattttgggtggtagcttaaaggcaaagactgagctagctggtgagaaaattaatcagctgcgtagttataatggtgaaaaatttgtaactattactgaagcagctgctggagagatcgttgctgcaacaggattgactaagacgtatccaggacaaggattcggcgtgggggatgcaccaactgcactgcttaagccagttttgacctataaagttaatccccaggataatgatcttcacgcttgcttaaaagctctgcaaaccttggaagatgaagatccacagctgcatgtgacttggtccgaacatttgcaagaaatccacgtgcaagtgatgggaaagattcaattagaaattttagaacagttaatgaaagaacgttttggtttgaatattgtttttgaacagggaagtattctttatcaagaaacaatcactaaaccaattgaagcagtaggccactttgaaccgctacgtcactacgcggaagttcatcttttactggagccactgccacgtaatagcggtattgtttttgaaaataaatgcagtttagaagttttgactaaaaattggcaacatcaaatcatgacggcattgaagtctaaagaacatcttggtgttttgacagcttcgccgattacagatatgaagattaccttgatcggtggtaaaggctcaattgtacattcggttggtggcgatttccgtgaagcaacttatcgtgcagtgcggcaaggtttaatggaaaaaaagatacgccaacaaactattttgctcgaaccgtggtatgatttccgcttagaaataggaaaagatcaggtagggcgtgctttaaatgatattcagcgcatgaatggaaaatttagtacgcctgaaaatattggtgaacgaacagtcatatccggttctgcaccggtagctgaaatgcaagattatgcgacagaagtgcgcaattatacgcatggtgaaggtaatcttgaatgcgtagtcagtggttatttgccttgtcacaatgcggcagaaattattgaggaaaagaattatgatcccgtttctgatctggagaatacgcctaactctgtcttttgttcacatggtgcaggtcacaccgtcacttgggataaggtgccagagactgcacaatatccttatacttatccattagattagcatgataccatgaattgtttatcttgttacatgtgaaacattaaaaatgcggcatagtgcttttcttattaaaaagtgcaacttgaaataagcgaaatatttgactagttatgaaagaaatttcattttattagcaaaatactgctagaaaatcgcttgcatagtaagataaaggtacgatagaaaggtgataaaacatgacacaaataccttttaaagctgtagcggttgatctagatggcacttttttgaccgaaaaaaagacttttgatcatgcgctatttgcaaaagttttacgaaaattgcaagctaatcaaataccgtttatctgtgcaacagggaaccaactaattcgttcgcatgaatattttgacgagtttactaatgaagtagattatgtgtctgaaaatggggcaattctagaagccgatggcaaagtatttaagcggattgcgattgactatgatactgcacaaaaattgttacattttattcaaacagaataccctgaagcaatcattatggttagcgcacagcatcattgctatattttgacgagtatggatcaagcggataaagacgacattagaatttattatcgtgatgttcaggaaatcgatcagtttactgacattgatccagccgatgcgatcttgaaggtttgtctgacagctgatgatgaactggcgcaggtgattcaggatcggtttaatgaaaaatatggtgactgtattcgcggcactagcagtggtaatatgacaatcgacttggtgcataaaggcattaataaggccaagggcgtagacgatatgcttaagcattatggcattgcgcaaaaagatttgattgcctttggcgatggcgaaaatgatattgatatgcttaaggcatgtggctatagctatgcgatgaaaaacgccaatgcgaaggctaaggcggtagcaaagtatgaggcgccaacgaatgatgaaaatggtgttttgaaagttttggctaagtatttagatattgattaatttaatacgcaaaaaagacttgagaagtaattttcccaagtcttttagtttgctttattaactgctctgaaaatattaagtccgctaattagaatgatgaatccacaagctaaaatcagaaccgtttcaccagagctgtctaacaaaattccggcaacaattgaactaatcggtccaccaatagaggtactggtacgaatagtagttagcactctgcctaatatttcatcgtccgcagtaatctgaatcaatgattctgccaaaatattgtgaatactcgtcattagcccaaataagaaaattagtcctgtgaatatcaaccaattgttactgaagaaaattatcaaaagtaatggtactgcactagctatccaagtaaaaccaattgtttttacccgtacggataatcttcctgcaatagttgcacctattacaaagccaatcataaaactgatatagaacatactgtatagtcccgcttgaccattttgttgagcaattcttggcaacagaatggccattgctggcgtcacaaaagaatacaggattgaggaccagaagtaatgacttaagaaataatttgttttaataaacttatagccattaagaatttgattgaggtattttgcctctgcttttttgactttaggtctatctttaatttcttttagggcgtaaaacagaaaaacaaaactgattaggctcagtagactgcagatcaacattacattagctgaaattaaaaaagttaataaaaatccagaaagagcagttcccgctacattcacaagctggtcgatgttgctaactttagaaattagattatttaattcttggtcatcagccgttgtttcttttaaaatagcccggtcagctggattaaaaaattcatcgcagacagatactattcctgcgcagattaatgccaaaatataacttttgctaagttggtaaactgcaattgttgtggcaaataggaaaacagtttgaacaagaattgaatagtaacttgtccttttgaatgaataatgatcgataatggggccgtagaatattgataaggcggcagtggtggaaaagatggcttccgcaattccgacgacaaaggaacttttggtggaagtttgcagccaccagataaagaccatgctgaagagggaattagctagtccgccaacggcacgcgagaaaaaatatgatttcttttttaacattttatttatcctattctcatttttattttccaattataccaatatttttccaattaggatcaatttaataaaaatagtacaaaaaaagacttgagaagtaatttttcccaagtcttttagtttgtcttaatttaggttaattaaaacttgttcttgtccaaagcaactggagaatctggcttttcaccattgatcatcttcaagttgttgtcgaatgccttaacaaccatgttacgtacggcgtgggtggtgtagaaggcggtgtgtggagttaccaaaacgtttggacgatcaattaagtcagctaaacgcttgtctgggaattctttgccttcccaatcttcgttaaatacaccaacttcgtcttcgtaagtatccataacaaagccaaagatcttacctgagtccaaaccgcggataacagcgtcagtgtcaacaagtggaccacgtgagcagtttacaattacaacgccatctttcatcttggcaattgattcgtcattgatcatgtgtacatttgctggaacatctggtacgtgaagtgaaattacatcagcttgcttgtacaagtcgtcaagtgagtcaacgtagtaacccttcttttcgagttctgggttcttgaagatatcgtaagcaatgacctttgcgccgaaaccttccataattctcataaatacttgaccaatgtgaccagtacctacaacaccaacaacttggtcacgaacttcacgaccaatagtaggtgcccaacgtaagtcgcgcttagccatcttttcgtccatacgcttgtcttgacgtaatacacgagcagcttggattgcagcatgttcagcaatagcgtcaggagagtatacaggaacgttagtaatttcaaagccaagttccttagccttgtccatgtcgatgttgtcgacaccaacgttacgtaatgacatcttagttacgccagcgtctgccaatgcttgaagagtttctggggtgtagtctaattgttggtaaacaacaacaccgtcagcacccttagctaacttagcagtttcaggagtcaaaagcttatcagtgtaatctacatcgatatccttgtgagcatccttccattcgtttaagaatggttcttcgtctttacgaatagcgtaagcaaaaatctttgtcataaatttaacctccgtaaaatttattagtatgaccagtcctcattatacgcttttacttgctcaacaaaacacaaaagaaccatttttttgtatagattttaagcctgaattgtcaaattaagtgcaacagttaggctatgaggaaatatattgcttgaagagttcttctgctgtgtgatattgaaggattcgacgatgtttgcggttaatggcatcagttgcctgttgaacataagcagctgacttatctttcatgcttttgcctttagggaagaattgacgcagaagtccattgcagttctcattggtgcctctttcccatggagaatatgggtgggcgaagtagatctggcagcctttgatcttggtcatatccgcaaactcagagccattgtcaaacgtgatcgatttaaaccaggcaggatgtctgtcaatctcattttgaagcagcctttggcatgtgcttgcccgatagtcaggaatcttgataactacttcaaagcgtgtggttctttcggtcaaagtcattaaagcaggctgattcttgcgtctgacgcctttaaccagatctccttcccagtgcagcggcgtttttctgtcttcaatctctttaggacgctgttcaatggaattgccaagatgcttcttgtgcaaagcatgaccgctatggccgtgatgacgcttgttcctgcgtcttttgagcttcataggcagatcaatattgcttatgtccagcaagccctgatcaatatagcgatagacagttggtgtgctgggacaagggtagcctggcatagtccttttgaattcaccaacgaattcatcgatgctggtggcatcaaatttagctttaaagcgtctggagagcattctcaaaaagacagcataatgcttcaatggattgcgctgatagcagtttttgcgacgcttctcataataaatctgtgcagtatcagcgtaatagtgctcatacaataaatagctgctgtctctttgcaggacacttccgcgtttgatttcgcgactgattgtcgacttatggcagccgacttcttgagcgataacagtacgggaagttatgccggaatccagcattgcttgaatttgtccacgttgtacgctggttaattgatgatagtgcttagaaatgctagaatttgaattggtcataaagatcttcctttcttgatttttcgtcacttcaagtttaggtcttcatggcctttttgtttaacacttagtgttgcacttcaattttaaatccgggtatagattttaagaaaaataaaagtcaagttttactctgagcaaaaaagttgcaattttttcaaaaaaagtttatagcctaaaaattgcaactattattaactgttacctaatctcaatcccatagatatgaaaattatttttgtatatagcaatattagttaaaggtagtatatggatttgtataagagacgcattttcgttatataacccaggttatataatggactttaagtagagaaacaaacatagcggaggaaaattgaatatgcattttaaaggagaaagccaacagcatttcagcctaagaaagctgacaattggtgttgcttctgtaataatcgggaccacctttatgttttttggtggtcatgctgttcatgcagatgatttaagtagagatgctgagcaaaccagctcagttgttcaaaaacagagtagtgagaaaatagatgtagatgcagtcaaagaagctgataatgtttcaaatcaaagacaagacttacccagacggtactaagagtaccgcaactgttcctgtaactgtcattgcaccaaatgtaccagacgttatctacgtaccaaagggtgacaagtttccagacccaagtactgtagttactaactctaacgatatcaaggacaagattcctgacacgacttacacttggaaaactactccagatactccaaatactaaagtagtaattaactataaggctaataatcctggtactccagataccccagttactccaccagtggatccaggcgataatccagcaaccccagttaccccgcctgtaaagccagagcagaagccaacaacaccaactcctcatgctactaagacaccagcaaaggataatggtggcaagaagacagtagctagtgagcaaaaatctactttgccacaaacggggaagaaggataacgttgctttgactgctatcggtgtagctattgcagctgctggaagcttattaggattagcagatagcaagaagcatagatcttaatttgtaatatctaatttctgtttactaagaagcaagttgactcagataggagctagcttgcttttttgtctaaaagtttaaggatttctaaagacaaaaagcaaatagtgacgcattgtcataaagctgatattatatactcataacaaaaatacaacgcatcaaatagagatgaattgtaagaaggtaacaaatcttctaattccttattaatacatcctattgggcctttattaattcatacattgggtattgctttttgctggttgtcccctatgcaaccgcgaaagttaagattgataataagtccatcccctttttgcgaaggtaaagagtcaagaccccctgcaacatctcttgcgttgaatcttttgttaatcttgataatttatcttcgcaacattagtgatgagtaggctaatgtaaaaaaatctcgttattctcattcaacacaactcccttaaaagggctggtttagaaaagtcatctaaatcagtccaatgtcattaagttaagacattgactaatctgatgacactttttgagacatttatcgaattattttattcgataaatgtcttttttgatagcacaaataagccatcttaagatagtcgtttaaattagttcaagctgctagacgataaggaaagccaactactaatttaacttttagatttcgtttatcttttcttcctggtcgaataggcgttaaataaaatgccacatccagcagtaattgtgtgaagtttttatctgaattatcacttatactaaaacgcgtggtgctagttaaatcgttttagttaataaaaaagtccaattagactagactcaagttgtaagtaatttaaatagaaaagagtctgatctaattgaactatctcaagcttaatcgtttttctcaccatttacaagttagttttaatcggttaaatgtgatttgtcgctcgctgtataagctttatgcgcctgatggacttaaacatcgtaaaaatgttgatcagaccaagcttcctgatagttctatcttagcgatgctcatttggcaaactgaaattggaattgaatctcaacgaagattctgtaaattcttcgttggcttatctcattctcgttttaaccgtcgagctcgaatgctcttgcctctaattcgttgtatccgtcagggttggaatcaggaagtaaaggtaggtggagaattattgattatcgacagttttccgattccagtttgtcagcctgttcgcaattatcacgttaagatcttccgtggcatagccgatattggttataaagcgacgaaaaaaatctactattatggcttcaaagtccacgcaatagtgagtgatgatggctatctgcttgactacgcagttactaaggcgtcggtacatgatgcaaaagagacggtagaattgatgatcaatgctcatccaattaaccattatcttttaggagatgaaggctatttaggaaaagacttagcagccaagctaaagcgtatgggatacgtgctttggacaccatatcgtaaaaacatgaggggtgctaaaaagcataatgatcatcagttaatggcaattagaagaacaatcgaaagcgacttttctttgcttagctattacaatgctgagaataatcgagccaggagcttagtaggttttcaacaacggctagaaatagctattttagcttataatatggcatattgtctagaacgatttaactagcaccacgcgtatactaaaatatcgtcgccagatacaacaggccattttaaaatctatttgatattgatattttccctgagtatacggttttgagctcgcaattattgataaactcacggcattatacattgcaaaatgggcgtatatttccatataaacaaattgatcttttttagaatgaaactgtatgccgcttaagtcatatttaagctccctaaaagaagtttctattccccagcgaagatgatagatctctttcattctagctagaggatattcatttcgatctaaattggtgatgaggacttcccactcatcgtctgaacctggtggattgattctaaacttacaaactctaaatctaacatcacacatatcctcaaaatcccagcgttgatctctggtattttttgaacgaacagctttatagtgatgctttttgtgaagaatcaggtgaagaaacttttctgtatctttatgggtgacataataataatgtgacgaagttactctgcatgataagtcaatatcgtattcatgattcgacatagctacaatttctttaaaagcaccatctccggattttgatcgcataacatagtggcaatgttttaatcgattgcaattttcaattaaattaaagctaatatagccacgatccatcaggactaagaaatctttttcttgttgggctaatttctttaacatagttaaggctgcctcacgttcatccattttttgtctgggttggataaccatgtctaaatataatttattcaagacatcataaagagcatttacatgaagttgacagtatattcgaccatctttacctcgaaaaatattttctgattcgggattaaaaggttgatcaaaatcagagccatcaatcgcaacaactaagtattgattatctaataattgcagtacattatttgcccggctaagttctaacataatttctttaaagcattcaggctttaatttagccttttgttgttcaaaagccgaagcagtcattctagaatttatgtcaggaaaagcatgaaaaatttccgaattcaggctgccagctcccatgttaagaattaacttaatcaaatcagtggaattgagcttacgacagcgagtaaaagcttgatcagatacagagaaatcgtgaatgttgtcagcgattttattgataatactatccatcagctttaaaatatttgagtgaagggatttcataagaggcacagctttctatgaaagaccagataatatgacgaaagtgagcagaaaggcaaataaactctgctcactttttattttaaaaagaaaaaagaccgaatcaaaatgattcgatctttaaaagctgtcgatataatgtcaatgtcttaacttaatgacattgaaatcagtcctttttctttttttcgttataattaaacttgagaactaaaacaaaggggaagaaaaatgatcttaatttcatggaatatcgattcattaaatgcagctctgactggtacttcagctagggcggaagaaacgcggcaagttttaactaaaattcatgatgccaatccagatattattgcgattcaagaaactaagctgcgtgcaactgggccaactaaaaaacataaagaagtgttggctgaaaagttccctgagtatgactatgtttggcgctcttcagaagaaccagctagaaaaggctatgctggtacaatgtatctttataagaaaggattaactcctgcagtgtctgagccgattattggcgcccctgagccgatggatcatgagggacggataatcacactggaatttgataaatgctttgtcacccaggtttatacgccaaattcaggcagtggtttaaagcgactagctgaacgtcaagtttgggaccaaaagtatattgaatatctgcaaaaattagatgaaaaaaagccagttttagctagtggtgattacaactgtgctcataccgagattgacttgaagcatcccgaaaataatcatcactcagcaggttttactgatgaagaaagagtcgactttaccaatttgctcaatgctggctttaccgatacctttagaaaagttcatggtgagattactggcgtatattcttggtgggctcaacgtgtcagaaccgctaaggctaacaactctggctggagaattgattactggctagtaagcaatcgcattgctgataaggtggtccgctcagagatgatcgatacaggcaaacgagcagaccactgcccaattttgcttgaaataaatctttaaattgaagcaagccctagtataatttctttttgaaatgtttttattttgaaaaagaagtaggagttgaaattctttgaataacgagaaaaaagaagattgggctttggagcaggatctgaagtacaatcgtctgacagcatttaagctattcgcgatgactagttcaatggttatttccgttgatgaactcgcaccatttggtaaaactggagcaacggcactgttttacttgttaattgctggaatcgcttggtttatcccgattacgcaaatggctggagaaatggcctcaattgatggctgggaaaaaggcggaatcttcacttgggtgaaaggatctcttggagacaaaacaggctggacagcaatgttttatcaatggattcatattactgttggtatggatacgatgatgtatgtgatcattggggcattgtctatcacatttgggacaccttggttcaacaccacgccaatcgtacgcttcattttaatgatggttattctgtggggagcaacagcgattcaggtaattggtgttagaaagattggtcgaatcgctgaatggctgtttattctggggattgcgacaccagtaattttattgatcatttcattcttcgtatatgtgattcaggggcatcccttgcatatgacgattaactggaatactgtaattccacataaattgaatggtaatacattagttgcctttgtcccatttatgttggccttttgtggtggggaagcttctgcaccgcacgttaaaaacttggaccacatcaagtcatactcaaaagttatgcttggcttagccgttactgcaatctgcttcgacttgctaggtagtatggcaattggaatgactgtgcctaaggatcaaatagagaacagtacaggctttgtttatacctatggcaagctgttaacgtcaatcgggctacctggtgatctgttgcaaaaaattgtgggtataatgttagcctgcggtattattggtgagctaggcaactggattgctggtcctaatcagggaatgtatgaagcggctaaagagggctatatgcctaagttttttgctaaaaccactaagcacggcgtgccattaagaattatggttttacaatcaagtatcgttaccatttctgcattattgattacttttaccagtggtgccgatgcagattttgcgtttaacgtttcattggccgcaacgacggcgcaatatctcatggtttatatgattatgttgattgcttacatggttttgaaaagaaagcatgaagattatcaccgtatgtattacatgagcaagaaccctaatttgagtattgcaattgcggtgcttgcattaatcatcacggttatagctttctttgtaacttttgttccagcacaaggcacgccaagcaatttgcgtcacgtttatgtttggaccttaatcggcatgtgtgccattgtgtcgattttgccacttattttgtatcgctggcatgaaaaatggcaatcacaatagaattaagaagcattcgtttttcaagacggatgcttttttagtagaatttgagagaggtgaataaaatggcggatgcgatgagggatgcaatattaaatggttttgttgatcaaaattatttaggaagtgaagaattaggtcctaaaatattagctaataatcagcaagagagaatctggcagaatttgcgccaggaattgtatagttgcaagtcctttacttgggcggttgcgtttattacgcaagacatgctagttccgtttaaggtgataatggcagatttagcgaaaaatggaattagtggcacgattattactggtgattacttgggttttaacaatccgcgtgtttttacggaattacaaaagattcctaatttagaagttcgtattgctaataaggcaggtttccatactaaaggatatttatttgatcatgaaaactatcaaactgtgattattggcagtgctaattttacacgttcagctctgctggctaactatgagttggctttgaaagtaagttcaaaaaagcaagcagatttaacagctcaattagtggataaaattgcagatttgaaacaggatagttttgttttaaattcagcctggctaacagattatcgtaaaaattgggtaaagcctgagcgagttgctactgatcggcatcagacaaaaattttaccaaataaaatgcaaaaagcggctttaaaacagatagaagcactagttacaagtggtgaaaaacgagggctagtagtgtcagccacaggaacggggaaaacttatttaggtgcttttgctgttaagaaatatcagccgcggcgttttttatacattgtgcatcgtgagcaaattgctaaaaagtcattagaaagtttttatcgtgtaatcggtggaccaagatcggattatggcttattaacgggaaataggcacaatttacaggccaagtatttatttgcgacggtacaaacgataagtcaacctgagatgctggctaattttaatagcgatgaatttgattatatcttgattgatgaagcacacagggcagctgcaccttcgtatcagcgccttttacattattttaagcccaatttttggttaggaatgacggctacgcctgaacgaatggatgagcaaaatgtttaccagatttttgactacaatttggcatatgaaattcgtttgcgggatgcactggaagagaagatgctggcgccatttcattatgtgggtgtccaggattatgaagcagacggagtagtgattgatgaaacaacagatttacgctacctagcttctacatctcgagtagactatgttttaaaggaattagactattacggctattgtggaacaaaggctaaaggcttggttttctgcagtcgacaggatgaagcacgtgaattagcttggctttttagtcaaaaaggacatcccgctgtagcattgaccaatgaggataatgaaaaaagacgtaatgaagtggttgcgtctttagttaaaggtgagattgggtatattgtagcggttgacttgtttaacgaaggaatcgacatccctgccttgaatcaaattgtgatgttacgcaacacacagtcgagcatagtgtttatccagcagttaggccgggggcttcgtaaatatcctggcaaagattttaccgttgtgctagattttatcggcaattataaaaacaattacatgattccgttggcactgaatcaggatacttctcgaagcaaagatcaagctaaacgagaaacgcgtctgccaagctttattgatgtttcaacgattaactttagtaaaattgccagtgaaaaaattttggcttcgcttgatagtgtcaagcttgatgggatgcgtgaattgcggcagagttaccatgatctcaagaacaaactagggcgtgtaccgctactatttgatttttatcaatatggctcagttgcaccgattgtttttgcacaaaatcatggcttggcaagctatgctgactttttgggtaaaatgggcgaagacgttaatttatcaaaatatgaaaatgaagtgctgtcttttgtgactaaggaattacttaatggtaaaagaattcacgagttacttttgttagagatgctacttgaacaagatattgttaagcaagaagattatctagctcaattgaaacgacaccatgcttatgtaaatgatgaattgttagcttctgttgatgcgattttatcgctagatttttttgatattaagcagggaaagactaccaaaaaagcacaatatggtaaattgccgttagttgaacgtagcaatttatttgactatcaattgaatggttctctacgctctgccctagatcaacatgattttaagaatttatttgttgatgctattaaaactggtttggccttaaatcaggaatatgataatcagcgtcaatttactttatatcagcaatatgatcgtaaggacgcttgtcgactcttgaactggcctaaggatgtttcggccccgatgtatggctatcgtgttggtgagcaggacacaccaatcttcatcacttatcataaagatgatcatgaaaagcggaatgctctgtatcgtaatacattggctgatgggcgcagtttgcgctggtatactcgggtaccacggcatttagattctgatgaggtacagcgtttgcttaatacgcgagggatgaatttgcatatatttgttaaaagaagcgatgcagatggtaagcagttcttttatttaggcaaggcaaagattcaagctgattctgttcgcgaagaattgctcggtgttaagaaaaagccagctgtagggatgaacttaatgttgaaacatccactgagtgagtcaatgcatgagttattatttgaatagaccaaaaaagcctttccgcttaggaaaagcttttttaattgccgctaatattaattagatcttggtcatcttggttattatccttatcaaacattctaggcttgatgtgatctagaatcttagtcccgatatttttctgagcagtttcatcaccgctaacctggtttaaaaacataattattccatatcgattatctgtagtcattttgatccaattaccaaaatgagtgttgcttaagctaccataagcagatttagtatggtcatcatctaaatgaagccctccagaataattagtggttgcacttttaagatgagttaagtaatagaaatcggatttgcttaagatactaccattggttaagccaagctggatcttgtaataatccattggggtagtgaacatattgcctgcgcctggaagctgggaggcaagagtctttttaacgtattcagcgtcttggtaatttttaccattattccagacgtaagagataggatcggttttccaactaggaatatcctgataaaggaatgtattagcaagccctaatttgttaatgatgcgattattgaaattgttttcgtaggattgtccgctgattttaataataattccggctaataaaagatagttggtattattgtagaagtaggttcctggtgtcccttgagtgccgttattagtattatcaatagcccaattgatggcgtcattctcacttaaaacttttccgcgatccaattcagtattggttgcttgaatgccagaagtatgggtcattaactgtccaatagtaatattatcggcgtttttaagattagggtaccaacgtgaaattttggtgttttgcgtaaatttttgactagtgtgccagttttcattcatcagctgaattatcattgctgctgtaacaactttttgcaaagaagcagttggataaactacgttgtcgttcccattaccaacttttttaccgtaccaagcgtagccatagctgatttgttgcggctgaccgtttttgataatgacgatactaccgcgagtattgttttgagccaaagtattgcggacaaaatttcgcatttcggttttagagtatgaactggcttgaacttgtggtggttcagtgatcgcaaatgcaggaactgtcgttagcagcgcagcggtagctagtccaataattgattttttcaaaaattaaaaggcctcccttaaaaagtggtttgtttacattttagcgcgttctttgcatcggacaaactattatcttggtgaaaagacgtatttttagctagcttgttgaaaaagtgcggctaattttgctctgagtgcgggatcatgagcgtataaataggtaccgcggattcctcgcttgaatagaacgttgagtgaattcatgaccatcttctcttcatattctattttttcttttgagttggttagatcattacgctttttgaacatctcaacatctgtaattttgtctaaattaactttaagttgattggtgcggggaatcaggctgattggtggaccgataatgatgccagcataatttaggtcaaaaccttggcaagtatagatagaaccaacttcattgattgttgtaggaatttctgcccaaggagttgatgtgtagttgtattgatcccatggcagcatgaatttcccttctttaatgtaatgtttgccaccatcaagagtagatggatagccggaagttgaaagaattcttgccaggccgtctgtttgatttctcttgacgatttcttgccgcattttttctgcatcagtaaaaatacgaaagtcgtagttgtgccacatttctttttttaagggcattaatttattatgtgtaaaaaagttaaaccattctattagactatctggtgccatcattctaaattgatgatgtagttgatagtcttcgtggggataatgatgagtaattgcttcaagtcgcttacgtgtccagaagcttttcattcgtaaaacttggttttcatcaaataccaaaatgataacttttgaccgcttaataacctcctctaattggttatcgtgataaaagttgttgtagtgatcaggctgagataagagcaagtgtgcttcatcaatgacgacaacatcagcactggtttgttttttgtccatctgattaataaatgaagttggccgcatataatttttcttatatagttctttaattggcccagcaatctgcttatagacttttagcagttcagggtgatttactaaaaagtagttttgagttttatacagttggctgcctgtttggtggtttaatttttgcaactgatcaaaaagggcagaaagcactacacttttaccagtacctgcttcaccataaatagtgaaaacagcaggatgatttttattgctgcaatgtgtaatcgaaaaatgtaaaattttttgtacgagaagtgattgctcttggttgagctgatggtaaggagagagtttaaaacttgcttgattattcaatatttattcacctcgttttcaattataatgaatagaaataataatgataaaggaagaaaacatgactgcacaaaaaataattcacgatcagctatttttaagacaaaaatctgatttagctggcaaaaatgatttacaagttgcgataaacttgcgtgatacgctactagctaatcgtgggaaagctgcggggctggctgcaaatatgattggtcagactaaacaaattatagcgttttatgctggcccgcttccatttgtaatgctgaatccacgtattattcaaaaaaagcagatgtatcttgctagtgagggatgtctgtcactagaaggcgagcgtaatgttcagcgctatgaagaaattactgttacttatcagaatatggagttagaaacagtaacgcaaacttttggtgactttatagctgaaacgattcagcatgaaattgatcattgcaatggaattttgatttgaatagtagaatatttacgtgattttgcaaaaaaagtaaaaaatttaaattaattttgcatggtttcagggatgaaaacccacaattttcgaataattagatttgagagaataaaatactttttaatttaatgcaaagataaaggaaaatatattacaacactacctagtgtatcgtgaagaacccgaacgaagagcaaaacttgccaaagcagagaaaataaggtaaattaataaagtcgcttcgagagatgcgacgagagcttaaaaacagacatgtaaggaaagaaaacaaataaaaagaaaaaagtacttgcaaagaagtaaataagctggtaatatatttaaatgtcgtcaggtgaaagcagaaaaagcttgagcaagacgaaaaaacaaatcaaaaaagttcttgacaaagaaatgatggtttgataaaatataaaagctgtctgctttgcaaaaaaagcaagacagaggtagtactttgaaaactgaacaaagtttcgctaaaagtgtgcgggtgtaaaaacccaaacaagaagcgaagtcaattcgcaagcaataaatttgagacaaagatcttaaataaggaatgagcaatcattcaaactttttaaaatgagagtttgatcctggctcaggacgaacgctggcggcgtgcctaatacatgcaagtcgagcgagcggaactaacagatttacttcggtaatgacgttaggaaagcgagcggcggatgggtgagtaacacgtggggaacctgccccatagtctgggataccacttggaaacaggtgctaataccggataagaaagcagatcgcatgatcagcttttaaaaggcggcgtaagctgtcgctatgggatggccccgcggtgcattagctagttggtaaggtaaaggcttaccaaggcgatgatgcatagccgagttgagagactgatcggccacattgggactgagacacggcccaaactcctacgggaggcagcagtagggaatcttccacaatggacgcaagtctgatggagcaacgccgcgtgagtgaagaaggttttcggatcgtaaagctctgttgttggtgaagaaggatagaggtagtaactggcctttatttgacggtaatcaaccagaaagtcacggctaactacgtgccagcagccgcggtaatacgtaggtggcaagcgttgtccggatttattgggcgtaaagcgagcgcaggcggaagaataagtctgatgtgaaagccctcggcttaaccgaggaactgcatcggaaactgtttttcttgagtgcagaagaggagagtggaactccatgtgtagcggtggaatgcgtagatatatggaagaacaccagtggcgaaggcggctctctggtctgcaactgacgctgaggctcgaaagcatgggtagtgaacaggattagataccctggtagtccatgccgtaaacgatgagtgctaagtgttgggaggtttccgcctctcagtgctgcagctaacgcattaagcactccgcctggggagtacgaccgcaaggttgaaactcaaaggaattgacgggggcccgcacaagcggtggagcatgtggtttaattcgaagcaacgcgaagaaccttaccaggtcttgacatctagtgccatttgtagagatacaaagttcccttcggggacgctaagacaggtggtgcatggctgtcgtcagctcgtgtcgtgagatgttgggttaagtcccgcaacgagcgcaacccttgttattagttgccagcattaagttgggcactctaatgagactgccggtgacaaaccggaggaaggtggggatgacgtcaagtcatcatgccccttatgacctgggctacacacgtgctacaatgggcagtacaacgagaagcgagcctgcgaaggcaagcgaatctctgaaagctgttctcagttcggactgcagtctgcaactcgactgcacgaagctggaatcgctagtaatcgcggatcagcacgccgcggtgaatacgttcccgggccttgtacacaccgcccgtcacaccatgggagtctgcaatgcccaaagccggtggcctaaccttcgggaaggagccgtctaaggcagggcagatgactggggtgaagtcgtaacaaggtagccgtaggagaacctgcggctggatcacctcctttctaaggaagcgaaggatatggagagcaggaatgctaagagaagtatccagagcaagcggaagcacactgagaaactttgtttagttttgagggtagtacctcaaaaagagctagtacattgaaaactgaatataatccaagcaaaaaaccgagacaatcaaagagaacagattgtagagcgaccgagaagagaattcttgagtaaggtcaagtagaaaagggcgcacggtgaatgcctaggcactaacagccgaagaaggacgtgacgaactacgaaaagcttcggggagcggtaagtacgcagtgatccggagatatccgaatgggggaacccaatgcagagatgcattattgattagtgaatagatagctaatcaaaggaagacgcagtgaactgaaacatctaagtagctgcaggaagagaaagaaagatcgatttccttagtagcggcgagcgaagaggaaagagcccaaaccaagtgatttatcatttggggttgtaggactgcgacgtggcagtgtaagagatagttgaattatctgggaaggtaagccagagagggtgagagccccgtaagcgaaatctcaagcacgcctagcagaatcctgagtaggccgggacacgaggaatcccggttgaaaccgcgaggaccatctcgcaaggctaaatactagttagtgaccgatagtgaaccagtaccgtgagggaaaggtgaaaagaaccccggaaggggagtgaaaaagaacctgaaaccgtgtgtctacaagtagtcaaagcacattaaagtgcaatggcgtgccttttgtagaatgaaccggcgagttacgttatctagcgaggttaagtcagaaaagacggagccggagcgaaagcgagtcttaatagggcgaaaagttaggtgacgtagacccgaaaccaagtgacctacccatgaccaggctgaaggtgtggtaaaacgcactggagggccgaacccacgtaagttaaaaattgcggggatgagttgtgggtagcggtgaaattccaaacgaacttggagatagctggttctctccgaaatagctttagggctagcctcgtggagaggataatggaggtagagctctgtttggactaggggcccgtcaggggttactgaatccagataaactacgaattccagatatccatacacgggagtcagactgcgagtgataagatccgtagtcgaaagggaaacagcccagatcaccagttaaggtcccgaaatctatgctaagtggaaaaggatgtggagttgcgtagacaactaggacgttggctcagaagcagccatcattcaaagagtgcgtaatagctcactagtcgagtggcgctgcgccgaaaatttaccggggctaagcatagtaccgaaactgtggatgtgttttaaagagcacgtggtaggagagcgttctaagagcggagaagttgaatcgagaggatcaatggagcgcttagaagtgagaatgccggtatgagtagcgaaagataggtgagaatcctatccgccgaaagactaaggtttcctggggcaggctcgtccgcccagggtaagtcgggacctaaggcaaggccgagaggcgtagtcgatggataacaggtagagattcctgtactgtgtcaaatcgttaagagcgaaggagggacgcaggaggtgaagcacgcatcgcgatggaacgatgttcaagcaacaagtgcggttaagagtcaaatgcttctaaccagcaacacgagttgtgaagaggagtgaattaaaagtagcgaaggtgtggtaatcacactgccaagaaaagcttctagccagagatgacatacccgtaccgcaaaccgacacaggtagtcgagtggagaacactaaggtgagcgagagaactctcgttaaggaactcggcaaaatgaccccgtaacttcggaagaaggggtgctagccaagagattggttagccgcagtgaataggcccaaacaactgtttatcaaaaacacaggtctctgcaaaatcgtaagatgacgtatagaggctgacacctgcccggtgctggaaggttaagaggagagcttagcgtaagcgaaggtttgaattgaagccccagtaaacggcggccgtaactataacggtcctaaggtagcgaaattccttgtcgggtaagttccgacctgcacgaaaggtgtaatgatttgggcactgtctcaacgagagactcggtgaaattataatacccgtgaagatgcgggttacccgcgacaggacggaaagaccccatggagctttactgtagcttgatattgagtatcttttaaacatgtacaggataggtaggagccagagaagataggacgctagtcttattggaggcaatgttgggatactacccttgtttgaaggatgctctaacctcgacctgtaagccaggccagggacagtgtcaggtgggcagtttgactggggcggtcgcctcctaaagtgtaacggaggcgctcaaaggttccctcagaatggttggaaatcattcgcagagtgtaaaggtataagggagcttgactgcgagagagacaactcgagcaggtaggaaactaggacttagtgatctggtggtaccggatggaagggccatcactcaacggataaaagctaccctggggataacaggcttatctcccccaagagttcacatcgacggggaggtttggcacctcgatgtcggctcgtcgcatcctggggctgaagtcggtcccaagggttgggctgttcgcccattaaagcggcacgcgagctgggttcagaacgtcgtgagacagttcggtccctatccgtcgtgggcgtaggaaatttgagaggagctgtccttagtacgagaggaccgggatggacgcaccgctggtgtaccagttgttccgccaggagcatcgctgggtagctatgtgcggaaaggataagcgctgaaagcatctaagtgcgaagcccccctcaagatgagatttcctttgcgtaagcagtaagacacctcagagacgatgaggtagataggctgggagtggaagtcctgtgaaggatggagcggaccagtactaatcagtcgaggacttgaccaaagcgaagcaaactggaaggttttttgcgagaaggattatgtttagttttgagtgtaaaagctcaaaagagtacggtggcgaaagcaagaaggatacacctgttcccatgccgaacacagaagttaagcttcttaacgccgaaagtagttggtgggcaactgcctgcgaggaaaggaagctgccgtgctcttttttaatattccggcttagctcagttggtagagcgcttgactgttaatcaagatgtcgtcagttcgagtctgacagccggagtaaagggaagaaggaagcggaaggcttcctttttttgtgccttttgggtatgttaaaaggttaattaggctaagcaagcatgacttgagggtcaaatttaatataatcattaatagaagacatagtaaaactcctaacaagcttaattgaattgattacggaggctatgctctctttttaagtgcataaaaatcgaaactgtcaaatcttttgtgtaaatagatctttctcgtaaattgattttttaattatttatttaatcaaagtaggattctaaggtgtcctgaacctgaccaaagcctttatgaattcgattgaaataacggtcattgtagctcattgcctgaataccaataaaagcatcaagcgactgttcagttggaaactctgccttaggcttagctttacgcttgatgacgttgttaaaggattcaatcatattggttgaataaattgaagctctgatttgtttgggataattgtagaagactagcagatcgggctcaatttccttcaaacctttgatgacatggctataagctttattccatttggcatagaatttgtgcaagacagctgcagcttcttttttgcttgtctgttgatgtatctgcttgaattcgttcatgatcttttcacgatcgtcgacgcgtactttagcgcagatattgcgcatgacatgaaccaggcagcgttgaaaatgagctttaggataagtcctggccaaggctgttttcatgccaacaacaccatcagaaagaaaaagctcaacttgcttcaagcctctggacttcatgttttgaagcatctctgtccaaacttcaatgttctcactaggagcaatgcagtagtcaatgacttccttatgtccattaggtttaatgccaatggcaatatagactgcttcacgctcaaacgtttctcggcgcaaaggaaggtatgtcgcatccaaatagacgcagaaaaacttgtcgcttagcttgcgcttgtgataagcctcaaccttggggagcatctgcttggaaatatttgatacttgagctggactataatgactgccatacattttctcaatcaagtcagcgatttctctggtggttacgcctttggagtagagcttgataatcgtgctttccaaaacatcagagtgctgcttgtagtcaggcagcgtgtgctgatgaaactgaccgttgcggtctcgaggcacttgcacttcaattggtccaaactgcgtatcaaccttgcggaaataagcaccatttctagaattgccagtattccagccatttctggcatagggatcatagcctagaaaggcagtcaattcagcttctagcaagttattaacagcctgttgtagctctttgcgcaataaatcatttattttgtctggattgaatagagcttgagcaaaatctttggtaaaatcattcatgaaggagttcttctttctgtatgtgttttttttgttcaaaccaatcatacgagaaaggaactcctttttctaatgtttaaagaaataaatttaaggaatcattcatccttacacaaactattttacagtctctaaaaatcttatagatagattattataaatattcaacgacagtaaaattaggtaagcaatctatatctaggaatctgttggggttctgattgtagtaggctaattatacaaaaatgagttaacaaaattctgatcagaattagtacggttaagattgaaaaaatagctggtaattattactgtatctctttgtaattaggtaacaatgctattttttacttctaaaatataattaaaccggtcagacaattcgtattgacctgaatttggataaacagttataacaaaactatgtgtgcaaagcagatgacaggaacttttaattgatctcgtatgttggagcgcgctgtgttgactatttgttctaagtgaacagatgacaagcatgcctctatctaagtaccaagatctaggaaattcattctgaagtagttaatatgtgtcaatatgtcgcacaaaggtaactatgaattacagcaacataagagaaatttgaaaaatagtttttaaattgtggcttgttattagtgaaaatgataaattaaatattattttggcagaaaatacagcttaataacaaaaaataaaaatattttttgcttacctttaaaaatatagttcgagatttataaagtttttaacgagttaaagtgatatttctataattgaaagcagattctactaatgtaattactataatcagaataaatatttcataaaaatacatagaacccgaacgaagagcaagacttgccaaagcggagaaaataaggtaaattaataaagtcgcttcgagagatgcgacgagagcttaaaaacagacatgtaaggaaagaaaacaaataaaaagaaaaaagtacttgcaaagaagtaaataagctggtaatatatttaaatgtcgtcaggtgaaagcagaaaaagcttgagcaagacgaaaaaaacaaatcaaaaaagttcttgacaaagaaatgatggtttgataaaatataaaagctgtctgctttgcaaaaaaagcaagacagaggtagtactttgaaaactgaacaaagtttcgctaaaagtgcgcgggtgtaaaaacccaaacaagaagcgaagtcaattcgcaagcaataaatttgagacaaagatcttaaataaggaatgagcaatcattcaaactttttaaaatgagagtttgatcctggctcaggacgaacgctggcggcgtgcctaatacatgcaagtcgagcgagcggaactaacagatttacttcggtaatgacgttaggaaagcgagcggcggatgggtgagtaacacgtggggaatctgccccatagtctgggataccacttggaaacaggtgctaataccggataagaaagcagatcgcatgatcagcttttaaaaggcggcgtaagctgtcgctatgggatggccccgcggtgcattagctagttggtaaggtaaaggcttaccaaggcgatgatgcatagccgagttgagagactgatcggccacattgggactgagacacggcccaaactcctacgggaggcagcagtagggaatcttccacaatggacgcaagtctgatggagcaacgccgcgtgagtgaagaaggttttcggatcgtaaagctctgttgttggtgaagaaggatagaggtagtaactggcctttatttgacggtaatcaaccagaaagtcacggctaactacgtgccagcagccgcggtaatacgtaggtggcaagcgttgtccggatttattgggcgtaaagcgagcgcaggcggaagaataagtctgatgtgaaagccctcggcttaaccgaggaactgcatcggaaactgtttttcttgagtgcagaagaggagagtggaactccatgtgtagcggtggaatgcgtagatatatggaagaacaccagtggcgaaggcggctctctggtctgcaactgacgctgaggctcgaaagcatgggtagcgaacaggattagataccctggtagtccatgccgtaaacgatgagtgctaagtgttgggaggtttccgcctctcagtgctgcagctaacgcattaagcactccgcctggggagtacgaccgcaaggttgaaactcaaaggaattgacgggggcccgcacaagcggtggagcatgtggtttaattcgaagcaacgcgaagaaccttaccaggtcttgacatctagtgccatttgtagagatacaaagttcccttcggggacgctaagacaggtggtgcatggctgtcgtcagctcgtgtcgtgagatgttgggttaagtcccgcaacgagcgcaacccttgttattagttgccagcattaagttgggcactctaatgagactgccggtgacaaaccggaggaaggtggggatgacgtcaagtcatcatgccccttatgacctgggctacacacgtgctacaatgggcagtacaacgagaagcgagcctgcgaagacaagcgaatctctgaaagctgttctcagttcggactgcagtctgcaactcgactgcacgaagctggaatcgctagtaatcgcggatcagcacgccgcggtgaatacgttcccgggccttgtacacaccgcccgtcacaccatgggagtctgcaatgcccaaagccggtggcctaaccttcgggaaggagccgtctaaggcagggcagatgactggggtgaagtcgtaacaaggtagccgtaggagaacctgcggctggatcacctcctttctaaggaagcgaaggatatggagagcaggaatgctaagagaagtatccagagcaagcggaagcacactgagaaactttgtttagttttgagggtagtacctcaaagattggaaaaacgccaagcgttagtcgggcctatagctcagctggtttagagcgcacgcctgataagcgtgaggtcgatggttcaagtccatttaggcccattgacataacgaagaaaaagagttaaagttatgtctggccgaaaataaaatactttgggggcttagctcagttgggagagcacctgctttgcacgcaggaggtcatcggttcgaacccgttagcctccattgatccagaaaaaggatcaaagagctagtacattgaaaactgaatataatccaagcaaaaaaaccgagacaatcaaagagaacagattgtagagcgaccgagaagagaattcttgagtaaggtcaagtagaaaagggcgcacggtgaatgcctaggcactaacagccgaagaaggacgtgacgaactacgaaaagcttcggggagcggtaagtacgcagtgatccggagatatccgaatgggggaacccaatgcagagatgcattattgattagtgaatagatagctaatcaaaggaagacgcagtgaactgaaacatctaagtagctgcaggaagagaaagaaagatcgatttccttagtagcggcgagcgaagaggaaagagcccaaaccaagtgatttatcatttggggttgtaggactgcgacgtggcagtgtaagagatagttgaattatctgggaaggtaagccagagagggtgagagccccgtaagcgaaatctcaagcacgcctagcagaatcctgagtaggccgggacacgaggaatcccggttgaaaccgcgaggaccatctcgcaaggctaaatactagttagtgaccgatagtgaaccagtaccgtgagggaaaggtgaaaagaaccccggaaggggagtgaaaaagaacctgaaaccgtgtgtctacaagtagtcaaagcacattaaagtgcaatggcgtgccttttgtagaatgaaccggcgagttacgttatctagcgaggttaagtcagaaaagacggagccggagcgaaagcgagtcttaatagggcgaaaagttaggtgacgtagacccgaaaccaagtgacctacccatgaccaggctgaaggtgtggtaaaacgcactggagggccgaacccacgtaagttaaaaattgcggggatgagttgtgggtagcggtgaaattccaaacgaacttggagatagctggttctctccgaaatagctttagggctagcctcgtggagaggataatggaggtagagctctgtttggactaggggcccgtcaggggttactgaatccagataaactacgaattccagatatccatacacgggagtcagactgcgagtgataagatccgtagtcgaaagggaaacagcccagatcaccagttaaggtcccgaaatctatgctaagtggaaaaggatgtggagttgcgtagacaactaggacgttggctcagaagcagccatcattcaaagagtgcgtaatagctcactagtcgagtggcgctgcgccgaaaatttaccggggctaagcatagtaccgaaactgtggatgtgttttaaagagcacgtggtaggagagcgttctaagagcggagaagttgaatcgagaggatcaatggagcgcttagaagtgagaatgccggtatgagtagcgaaagataggtgagaatcctatccgccgaaagactaaggtttcctggggcaggctcgtccgcccagggtaagtcgggacctaaggcaaggccgagaggcgtagtcgatggataacaggtagagattcctgtactgtgtcaaatcgttaagagcgaaggagggacgcaggaggtgaagcacgcatcgcgatggaacgatgttcaagcaacaagtgcggttaagagtcaaatgcttctaaccagcaacacgagttgtgaagaggagtgaattaaaagtagcgaaggtgtggtaatcacactgccaagaaaagcttctagccagagatgacatacccgtaccgcaaaccgacacaggtagtcgagtggagaacactaaggtgagcgagagaactctcgttaaggaactcggcaaaatgaccccgtaacttcggaagaaggggtgctagccaagagattggttagccgcagtgaataggcccaaacaactgtttatcaaaaacacaggtctctgcaaaatcgtaagatgacgtatagaggctgacacctgcccggtgctggaaggttaagaggagagcttagcgtaagcgaaggtttgaattgaagccccagtaaacggcggccgtaactataacggtcctaaggtagcgaaattccttgtcgggtaagttccgacctgcacgaaaggtgtaatgatttgggcactgtctcaacgagagactcggtgaaattataatacccgtgaagatgcgggttacccgcgacaggacggaaagaccccatggagctttactgtagcttgatattgagtatcttttaaacatgtacaggataggtaggagccagagaagataggacgctagtcttattggaggcaatgttgggatactacccttgtttgaaggatgctctaacctcgacctgtaagccaggccagggacagtgtcaggtgggcagtttgactggggcggtcgcctcctaaagtgtaacggaggcgctcaaaggttccctcagaatggttggaaatcattcgcagagtgtaaaggtataagggagcttgactgcgagagagacaactcgagcaggtaggaaactaggacttagtgatctggtggtaccggatggaagggccatcactcaacggataaaagctaccctggggataacaggcttatctcccccaagagttcacatcgacggggaggtttggcacctcgatgtcggctcgtcgcatcctggggctgaagtcggtcccaagggttgggctgttcgcccattaaagcggcacgcgagctgggttcagaacgtcgtgagacagttcggtccctatccgtcgtgggcgtaggaaatttgagaggagctgtccttagtacgagaggaccgggatggacgcaccgctggtgtaccagttgttccgccaggagcatcgctgggtagctatgtgcggaaaggataagcgctgaaagcatctaagtgcgaagcccccctcaagatgagatttcctttgcgtaagcagtaagacacctcagagacgatgaggtagataggctgggagtggaagtcctgtgaaggatggagcggaccagtactaatcagtcgaggacttgaccaaagcgaagcaaactggaaggttttttgcgagaaggattatgtttagttttgagtgtaaaagctcaaaagagtacggtggcgaaagcaagaaggatacacctgttcccatgccgaacacagaagttaagcttcttaacgccgaaagtagttggtgggcaactgcctgcgaggaaaggaagctgccgtgctcttttttaatattccggcttagctcagttggtagagcgcttgactgttaatcaagatgtcgtcagttcgagtctgacagccggagtaaagggaagaaggaagcggaaggcttcctttttttgtgccttttgggtatgttaaaaggttaattaggctactattattggatattcatttatcatttaaaattgatctgggtgccgttaatcggattaacaggctatgtaattaggttatatcaccgattattgccacagaataaaaaatcttcaaattataagaatatcggtattatatcagtttacaaagtaatatttataatgtttgtatgtgttaaacgcaatcaattatatgattataatgtaatcatcagtaattaaagactgtagttgaatcaaataattaactcagcgtataaaatgctgagttagacaaaaaaacaacgagcaattctctcgttgttttatggattcattttgatcaaatttttagtttatctttagttgtaaataccaacttgattaatgtgggccaattccagaactggagattgagcgaagtccagactaacatcacagccagcatggataccattattttcgccattaagccagtgggtattattagttacgtcatagacagtaccattaaatgcaatataagctggacgtccatttttaccattgtaatttgatagagtttctttagtaaattttctcatataagaagctcctttctaataagatcttgatatattaatggtaacactttgtcaccttatagcaagagatacgaaggagtcttatgcttttcttatgaaagatgaccacgccacccagcaatatcccaatctagaaagtcataattaagctttttaccataaattttctcgtaggcagcaactttttgtcggtagtcgagttccatcatcttatgagcgttttcgttggcgtttagagaaacgtcagggaagattggtggtaaaacatggacaatatatttggtctcataaaaattaggatctttcttttcgattttaggtagatccttaatctcgacaaaagtggagactaccggtacattttgtttagccgcaaaataataggcaccacgttgtaatttgcgaggcttgcgataattccaccacatctcctgttctggataaattaaaacccaattatttttagctaaagctgcactgaggtgcttaggaaattcatttccaatatagctaggactctgaactagtggaatagtgccaacataattcattaaatagcggaaaaatcccggtagcattaggttagtatcttcaattacaattgaaagctgatggtgcatcttgttagcgagcagcttcattggtaaagaatcaacctgattgtagtggttagaagttaaaattgcgccaccaataggtaaattatttaggttctctaaacctacaaattcagttgatccagctaatgctctggataaagtaccaaataagagatgtccaatacgattattaagcttacttgaaaaagtgttacgcttattccaataatcattgaccaatttaaggcgctgatctagggacatttggggatcgccgatttctacttttgctgtgaagttacgttcattagcagctttttttatatttttaatcactgcctcacgattatcgccaaaaatcatagtgttactgcctctcgtttcttaacttttgcccaattattaggatcttgctcagttttgtcttccttagcaagcatatgatccaatttttcgcggtctgctgcacgctcgtcatcagtataattattgagttcgttctttaattcatcgaaaaactgcgtttgtttggcactatcccagaagtactgtgcatattggacattagcaaaatgccatggcttaaagaaaagattatagtgaatcagaccaggattagttaaaggttcagtgttttcatttggcatagcatcccagcgaggatttaagtgcaaaattctgccttccccgatttcatttaaatagtcttgatcaggagcaatacaatcaaaatgatacttttctaaaagtgtcataaaatggtcaataaaatgttcagcgcgaaaggccctagcattcatgacgagcatgccagagttaatgtatttcttggggtcaagtgccaggacatttttgatgtattttatcatcttgtctacatattgaattgaggagtcggtgcaagcagcaaataaattatcacccaattcggagttgtatagtttagcaagatcgtcgtttacaattgtgtcgctatcaatatagatcaccttatcatattcgggaaaaagttctggaataaagaggcgataaaaaatcgacatggtaaaaaagtcagcgcgaagaaagttttccttacgattttgaataggttgtacaagttgatcatcaatatggaaaaacttcacatgaacgtttgaactgctaagatcagacaaagctttttgatgctttgatgagagatcttgatttaaaaagtaaacagtataatccttatttggatctgtatgtttgactaaagaattaagagaaacagcagcgtatttggtaaagtcatcgctgatactgtaaaaaataggaattgtcataaaattacctttcttagattttaactgattccgtttgtttaaccttagcccaggtatttggctctttgacaatcatgtcaacttttttggccatccattctaggttagctcgggccttttgacggtcttcatcagtaaagttgtctaattgctgctttagttcatcgtaatacggcgtagttttagcaacataccagaaataatgaccatattgaacatcagcaaaatgccatggtttgaagaaaagattgtagtgcacgatcttaggatcttgaatttcaggaatgctttcatttggcatagcatcccattctttaggtaggtgataaatcttatcttcgcaaatttcattcatgtaggcttgatcagggtcaacgttatcgaaatgatatttattcattaagtaatagaatttatcaacaaactttttgtctctaaaggccttcatattaaacagaattacaccattattgatgtatttttctgcaggaaaaattccctgacattctttaatgtacttttgtaaaagtggcatgtaacgaattgataagtcgggacatgaagcaaacatgttgtcggcgatatcaatttcatacattttagcaatatcagtacagataatagtatctgcatcaagataaactgccttgtcatattgagggaacaattctggaatgaatagtcggtaaaaaattgacatagtaaagaattgagcacgcaagtagttttccttagtattgtgaattggcttaaccatgtcatcgtcaatatgaaagatttgaacatgaatattatcagttgaaagatcttctaagctctttttgtgctcatcagatatctgttggactaaaagggtaatcgtatagtccttcttggggtcagtatggtcaattaatgatttaattgaaacatatgcatatggcgtataattatcgctaattgtgtaaaaaacaggaatggttttcaaaataagatcctcctaaattatttttttaaattatttcgtaatttgagatattcgttaagcaaatcatcatattcatgtaaatgaagtacactgtgtacgcgatcaacatcccatggcttaactgtttgagtatggaaataaggccaaaacctaaagctagtagtgaaatgttgaattttggtgtttttttgcaaatgatattgctcattataacggcgtggtgctactcgcttggctacagctagcttgtttattgctgattggtcgggcaaaaacatttgcttaacctgcatcatatgccgcacctcggcaaagagatcagtttgcttaattttcttcatattcagcaacaaaacgccagaattaagataatcaaatgcgcgcttggtcttaagattgtggaagaagaagcggccccaataatcaagtacgcccactaattcgattccggtaatatcctcattgtaaaaagttgtaatatcaccgcgaatgacaatgtcatcgtctaaataaagaatgcgatcaggaatctgtggcaattggtctgcaaataaacgcaacatagcatatggcgtgaagcgagtattcatgttagcggttggcggttcctgttcaaataacttggtgcagtcaattaattcaactgtactgttaggattggctttttttactaaagaacgtaaaaaatcagccgcatgttgtgagaaagggtgatatttacgttcatcactgtgtgcctccatcgttaaaatataaagatgcaattcttgagcaccagaatttttgattaaagataaggtggaaatcaaaacgccatcttgagcattttcatctccacaaaaaagaatattcatgataaactcctattttttatttcttttgaatatattgacaatattcataatcgctattttttgcacgctgcttcattacctgccaaatttcatcgtgaagcttattttgagcttccttacggcttaaatttgtatccgggtaaaagggcccatcaatgtaaataacggcactaggccgcttgctaagccactttttatggtaggttttggtcatgacgaaactaggcgcatttaatttaactggaaagtgcatgcttgttgcatcgaacgggcgaatcttcgtgtaatagggccagacatgagcttcagggtagatgagaatctcgccctttttatccttaatcacagtttgaatggctttaattagtttgagcgattgcttcatatttttgccaacaggcagaccgccgtagcgtacaagatatttgccaatgaaggggatgccccagttagcttgattagcaatagcataaaaatttttgattggaaaaattgtgagcgaggtaaagacatcccccatgggtctagtatggttgccataaataaaatagcccccattgacttgcttaagtttttcttgaccaacgacttttacatgatcgaagaagcggaaaaccacccaaccaaaagcgcatgctaagtgacaagcggtagtggaccagattctagctccaagagaattaggtagaataacgtaattatcgggtagactgaaattttgatcgtgactatcgactacatcatcggttgttttttggtaataataaatccgtttcatcttgccctccatgatacttatgtatcctatgataccatggaaaaaagcctaattcctaagacgagaggaatgctgaaagaaaataaaaaagattcgtaatttcatgatcgaaaaatacgaatcctctgtaaaatagcataaaaaaagcaccgccttcttgcagtgcatctttcatattatgggtggccaggggatcgaaccctggacccacggattaagagtccgttgctctgccagctgagctagccacccatatttgttcatcagctcccgccgacatttaaatatattaccagtagttttataatttgacaagctttttttgaaaaaagttgaaaaataatttgaagctagcaaaaagcgcccataatggccgcttttttactaaagtttatcttgaatatgataggctgtgccttgctgatcctgcttcatgtgatctgcatagtaaacagcatagacaccgctttgatcatttttggcaatcacaatttggcgccctgttggacgttctgccttaatgatttgagcactgcggcgtgcttctttaaagtcgtgtgaagatgcgatggcatcccctggattaaaaaatacagcttcgttcattgtaaagccccctcgtacaaattctaattttattttaccaataaagccctttctaaatccaatttaagaaacaaaaaagagataagatcaacatcttatctcttacgaaaaatattatgggtggccaggggatcgaaccctggacccacggattaagagtccgttgctctgccagctgagctagccacccatgtcgttgaatcaatcaacagatattattatgctattgttgataagaaaatgcaagctttttttgaaaaaaaacaaaaatttttggctaatgttacaaaattcagtataatgtaagggcaaaggaggcattcccgatgccaaagaagattctcgtcgtcgacgatgaaaagccgatttctgatattatcaaatttaatttaactaaggaaggctttgatgtcgacaccgcctatgatggcgaagaagctgttaaaaaagttgacgaatacgacccggatctaatgattctggatttgatgttgcccaaaaaagatgggttggaagttgcgcgtgaagttcgtcaaacgcatgacatgccaattatcatggtaactgctaaagatactgaaattgataaagtcttaggactggaaatgggtgcagatgactacgtaaccaagccgttttctaaccgggaattagttgcccgtgtgaaggctaacctgcgtcgtcgtgatattgttaaaaaagcagaagctgccagccaagaagagaccgataagaatattaagatcggtaacttggtcattatgccagatgcctatattgtagaaaaaaatggtaagaagattgaacttactcaccgtgaatttgaacttctttactatttagctcaacatatgggacaagttatgactcgtgaacacctgcttcagactgtttggggttatgactacttcggtgatgtgcggactgtagacgtaacggtgcaccgtttaagagaaaagattgaagataatccaatccaacctcaaattttagttacccgtcgtggtgttggctattatgtaaaacagccgagtgaagaataataaagaaagccacagaactgttatggtagtggctttcttttttatattttttagatattgaatgagtagaatgaaaaaattcaaagcaagattaaatagtacatttaattccattaatactaaaattgcaattgtgttcatgctgatgctactggcaacaattgaagttattggagcttattttacccgtcaattagagcaaaatagcattgaaaatttccaatcatcaatccagattcagactatcgtcagcaatcagttagctaatcagttgaccagtgataataaaaatactaatgatcgcttgaatcaaattgttaatgactacaataatgatgcaattagtgaaattattgttgtcgataataaggatacgattcgtgccgtttctaacttaaatgataaaagtaagatcggtcaacggattaacaatactgatgtgaagcaggttatttcaactggacatcaaattaataaagtggtcgatgatcatggcaattacatgattcaaatatcgccgttgactagtggcaatggctctaacaatactgttggtgctgtctatgttaaagctagtatgcaagatgtctttaacaatttgcgccaaatttcattgactttcttgattgcgtcattgatcgcggctttattaggtgcatttttgtcattagttatttcccgggcaattacgcaaccgatcgaagaaatgcagaaacaagcattgcatattgctgatggtgattattcaagtcaggtaaaaatttattccaatgatgaactagggcaattagctaaagcatttaataccctgtccgtacgaattgaacgctcacaagaagagtctgatagtgaacggcggcgactagatagtgttctgtcacacatgagcgatggagttctagccactgatcgtcatggtaacgtcagtgtggttaatcatatggcactaaactttttaaataaaaaagaagacgaggttatcaataagccgattgctgaagtactgggactagaagatacttcgtcacaagatttgatttctagtcaaaaagagatcgttattacccttgatccaggtacgcgggatgaaattattttgcatgctagtttttctttgattaagcgggtaactggctttgtatcagggtcagtttgtgtattacacgatgtaactgagcaacaaaagaatgaagattcacaaagacagtttgtttctaatgtctcacacgaattgagaacacctttaacaagtttgcaggcttatattgaagctcttaatgagggtgcttggaagaatccagagattgctcctaagtttttggaagttacccaacaagaaactagtcggatgattagaatgatcaatgacttgttgagtttgtctagaatggaccgtggcgtttcaaaaatggatctagaatttgttaacttaaacgattttgttaaccatattcttaaccgtttcgatatgattgttaaaacagataaaaataaagaaaagaagaaatacacaattaagcgtgaattaggcagtcaagccttatgggtggaaatcgataccgataagatgatgcaggtaattgataacattatgaacaatgcaattaagtattcacctgatggcggtgtaattactgttagaatgacccaaaaccaaaatcatgttatcttaagtatttctgaccagggcttgggtattccaagaaaagatctgggtaaaatctttgaccgcttttaccgagttgataaggcacgttcccgggcccaaggtggtaccggcttgggcttggccattgctaaagaaattgtggaagctcaccatggtaaaatttgggctgacagtagcgaaggcaaggggtctactttctatatttccttgccatatgaaccgatgacagaggaggatgattgggatgaagtttaaattcaaattcggtgaatttttcttaggcttagctacactgatcgtcattgtcctctcaattgtgctttggatctttattatgactagtgatcagcgctttagtaatattggtcagcaaaatcaaaataatatcactaaagagcaaacgcgtagtcacaattttaagtcattatatgatttatatattccaactacttcatatggttttgctaatggaaatttgtgtcagctatatgattcaaaaaataatttgactttagaatttaccaaagagataaaaaaagccaaggccactaataaaattaagaaaatagttgatactagaactaaatatgaagagtatttaaacaatcccaactatgtgcagttggtttatccagatgaaattactttctccttatttaaccagttgaataatgccgcaaatgataaccgcgagtttaaccgcttctttatctcgcagtcaaatcactggatttatttgggaaatgatcagactaatgaaatttatcaagtaaaaattgctggcgcaaattttgataaactacgtaaatatgcatgtaatgctaagagcaagtatccagttagattagttcgtttaaaggaaggctattcaccgttttacatcaagacaatgaatgctaaagtttatagttacttgactaatcatcaatcgtattcttactttgtttcgcgtttattaggtacatctggcgttactagtaagactaataagaatggtcaaacggtatattctttgaactactatactcgcttaagagtgccagattctaattcaggtgagcataattatctttatactcattatgaaaaaaataagatccccaatactactaaccgcttattagatagcgtttattatgttcaccaattgggtttaaccgagcaagatttacgcttctttgatgcagatggtgctaatgttagttatctaaactatattgaagggattcctgttttcttaaataagcatgatttgcaagtcaagacgaccttttcaacagattcgattaatgtggcctttaatagtgtaaacttccaaattccaattccgtttgatggtcaaactaagcggttaaaaccaacccaagatgttgttgatgaattagtcaatcacggcctaaagcaggaagatattcaacgaattatcgttggttttgctgaagaaaaggattcaagtcaccatagtttgattaacttgatcccaacgtactatatcaaagcctacgatgaatggaagagcctaggtgaatgggaaaagcaagacgtatctacctaccgtgaagctgatcagttaactgttaacgaagggggaaaatagaaatggaccataaacgaatcgaatggctatttttcgttgttttctttttaattgatatttatcttggaatcgaaattctccgttctcccgttaatttaagtaacgctgataccactactcgtagtgttgctagcatccgcaatgaaatgaagtcagacaatattgatttgcccgataagatttcggatgcaccagattctggttattatttagctaccaagaatcgtgactatctctctggcaaagttagctcgctgactaatgtaaatgcccgctattctaaaagcgataatgtgctttatggtgaaccaagacaagcagtccttttgagtaaaaaacctaaggaagctttagaacaaattgaagattttaagaatgattcgaaaaatattccttatggtaaagaattcaagtatgaacctgatatgtcgagtgaagacaattatgtttttgtgcaaaactcagattatggtgaaatttatgctaactcggcccaattgaatatcaatgtaaaagataatcagattattaattttactgaaacatatatggggcaagctagtccagtgcgtgaattacagtcaaccatcagtgcttggcgtgctgtgcgtgcgatgtacactgatcgtgagttgactaataattcgcgcgtaacgcaggtaaaattaggttactccaaactgacagaagtacgtggcagcacaatcttgttgccaacttggctggtttgggtagaaaataagacaactaaaaatatcacgatgaaacgtattaatgcatatacggcacagatgctacaatcgagtacctataatgtagaaaagtagaagggacaaaaattgaaggtttccgttttagcaagcggctcgaccggcaataccagtttaatcgttacaggccagcataaaatcctgatggatgctggcatttctggtaagaaaactaaagatttgctagccgaagttggagttgatattaacgagattgatatggcctttttaagtcatgatcataccgatcatagtggcggactcggcgtgttgatgcgccgttatcctaagatagatgcttttgccaatagtgggacttggcagtatttattggatacgaaaaaaataggtaaattaccggctgaacaaatgaatacaattgaaccaggccaaactaaaacttttggtgatgttgatattactgcctttgcaactagtcatgacgcagctgagccgcaatattatgtgtttactagtggtggtaagcgggtcgcttttttaactgatacaggttatgtatcagaagaagttgaagggacaattgaagatgctgatgcctatatgatggaatttaattatgataatatgatgctcagagatggaccatattcctgggcactgaagcagcgaattttgtcggatgtaggccatttatctaatgacgaagcagcccaggcattagttgatgtagtcacacctaaaacaaagcatatctttttagcgcatcgcagccaacataataatacggagtatttagctcacgaaacggcaaaggaaatgctgcttgagggggatgcgaatttggatgatgatgttaagattattgatacagaacctaatcagcctacaaaattagttgaaatttagcagttttcacaacattttttcatataatattcaaatttaatcggtatgattagtaaacaagatgaggggagaagcaagcatggtagaaaatcaaaataataataacaatttacaacaacctagaaaaaagaatactaatggtaaaatcattgccactgcagcgattgtcggtgtagttggtggcttgatcggtggaggcgtttcatattacgcagctgatcaaatgaataatgcatcagttaataatggtgccgctcaaactagtgtatcttcaagtagtagtaaagtttcagaaaagagtgctaagactagtggcacaatgactactgcatataatgatgtaaaaggagcggttgtttcagttattaacttaaaacgccaatcaagttctaatagtactaattcactttataatagtttattcggtaatgatgacagtgatgatagctattcatcaagcagcaagggcaagcttgagacttacagtgaaggctcaggtgtagtctacatgaaatctaatggcaagggctatatcgttactaacaaccacgttatctcaggcagtgatgctgttcaggtaatgctagctaatggcaagacagtaaatgctaaagttgttggtaaggatagtacaactgacttagctgtgctttcaattgatgctaagtatgtgactaagacggccgaatttggcgattctaagagcttacaagctggtcaaactgtcattgccgttggttcaccattaggtagtgaatatgcttctacggtaacgcaagggattatttcagcaccggctagaaccatttctacttcatcaggcaatcaacaaacggttattcaaactgatgccgcaattaacccaggtaactcaggtggtgccttggttaactcagctggtcaagtgatcgggattaactcaatgaagttagcccaatcaagtgatggtacttctgtcgaaggaatgggctttgcaattccatcaaacgaagtagttacgattgtgaacgaattagttaagaagggtaagattacccgtccacaacttggcgtaagggtaatcgcacttcaaggtattccagaaggctacagaagccgcttgaagataaattctactttgaagagtggtatttacattgcctcagtaaacaagaatagttcagctgctaatgccggaatgaagagcggcgacgttattaccaaggttgacggcaagaagattgatgatgtggcatcgttacacagcattttatacagccataaagtcggtgataccgtaaatgttaccgtgaacagaaatggtaaggatgtcaacttaaaggtaaaacttgagggtaactaaaaatcaaaatagaagttaattaaaagaaaaaaggctatatcacgcggtttaaacgtagatatagcctttttgttaactttttaaatgtgtaacatcaaattgttcggaattatttgttgtcaaacagacactagcctgttgataagtgtggataactctgtggattgtgtataacttgataaatataggtttattaacttgtggaaaaatatgatgattttgaccttatttagtgaattctatttgagaaaacaggcgttcatgcaggcataacaagccttaagagataaagtttgtgaaaaaaggctttcataaaatcgatgtgaataaagaaattttagaaaaattattaaatacaacttctggggtataagtaaaataataccacaaaatgttgaaattggtctttgaagttttgtggaaaagtttgggtaaatagtgtggaagggatgttagtattgtgctggtagattaaaattatgaatggaaaattagctatgcttgttataatagaagcatgaatatcaaaattgtatgtgttggaaaattaaaagagaagtattttagggatgcaattgcggagtatgagaaacgactcagtcgttttgcaaaggtgtccattgtacaggtgcctgatgaaaaagcaccggaaaaattcagtgcagctgaagatgagaaggttaaagagattgaaggtcagcgaatcctgagcaaaattaaagataaggagtacgtgtatgtgactgcaattaaaggaaagcagcgcagcagcgaagagttcgctaaagagattcaggatctcgcaacttatggtcattcagacattacgtttgtcattggtggcagtttagggactagcgatgctgtaaacaagaggggaaatgacttgattagttttggtaaattgatgatgccacaccagttgatgcgcgtggtgttgattgaacaaatctatcgtgcatttatgattaactcaggtagtccttatcataagtagaatatagaaaaagcccataaattgggctttttatttttgcatatttgcagatttcacaagcatattgaaaaaaactgtggcaggtcagtgcttttttagttttttatgatttaaaaatagattttgttaaattatgtttggcaacaaaaaagacgatctttcgatcgccctgataatttttgagctaccagctagtagctcacgcacacgctgaagtgtactttatctttgtagtatctcaattttaacacataaatggtaaaattaaaactgcacgttgaagggggtaagtgtcaatgtttttgcggtagcctttaaaccattagtctaaccttaatttcttaaatatttatatgacttaaatttctgcttagcttgcttaaataactattgccagctacctgtgcggttaatgcgccatgctggatgcctaaatgaacttcatgacgcttctttaagctgtcacgggccgctgcttttaattcctgttcagtcaatacagttatttctgaatcttcaaactcgctgctaagccaaaattccagctctcgattcttgatgcagcttaagatcctaagcatgccttctgctccagattttgaccatttcttgccttgccccttaacacggtaggtatacttgcggtggttgctctcgcagcagccaatggctttagtcacagtcagttttcgtttcttaaacggcttaatatcgtcccaatgacgatcaatataattccttaggcgccccagataatcatgattgagctcggtattcaattcatcaattagtcggctttctgcagtggttaggatagttttaactttgtcatagctgtatttgtattccaaagcagaaatcagcttgccttgcaggtcaggcgcaaaatatagcctttctttgattttcttatttaggtgaaagacatccaagaaatgctcatgacgcttgcatagccctacaatgtcatcgaagtctgttttggcatatccagcaccgccatcggcgttgctaagaattacagtatcagaaagatcataagtattggccaggtactccttggcttcgttcagcgcatcaagtcggcttaaagaaacaaattccttggcattgattcgctttctgcgtttcttgcttatattgacaatgccttcacagacctgatagcgatgaaattccaaccggcttttagtgcctttgatcaccacgccatcgccttcaagatacaaaactgggacctttttcttagtgcctgcggcatcatatcttgaatctgcttcttggcccgctttaatatttttcccggccatttttaccaaattgcccacctgcatatggctaatattaaagccagacaggcaattgactgctagagcagtattgcgataagtggcaacgctgcttacttctaagatgtttttgactgctaaaatactgtagcgcttgtatttgtcaaagcccattaattcatccaagggataccttgcttgtttgcctgggcagacatatcttcttctgacatacctaacttcgccaaaagccatattgattgagcgctcattcttcttatcaatctgatagccctgtgctttaaccttggtaatcatttcatcatcaactttagctaaagccaaggccatgatttccttaatcaggtttaagaagaaacagattatttttctttcacgcttaatataattatcttcagactttataatatttgcgatttcagttacaattgaattcataaaagaccagcttctaatgtgttttttgttcttaacatcagactactggtctttttgtttgagctcaagtccaaattcaaaggacttgggcttttttaattatttattcaacttaccgtaaaaaattatacacttagttgaaggggtagcgcccttactcgtgtggaaggaggtagactcccatgaagtattactttatctttgtagtagtatttctaccactgaatcgtgatggcaagtgcttcaagaagctcaagaaggctattaaaaagttcctcaagaacctgattgatagtttctttgattaatccgatccagactcaatacagccgtccttcggggcggctttttttatgatgaaaatggcaagtcattgggtgaaaagtattacgcatatcgtgcagtaactgtaaatcaaagtcccataacaattaatggcgctaaattctacaagttggctgatagggatgcttatattaaggtgaccaatattagtggtcaaggtcgcgttttaaagcgtaacgcctacatctacagtacatcaaaaaaacgcactacgcataacggtgcttggaagttgtacaaaggctccacagtgacaacttacggtggttcatacaagtttaagaatggcaaacgctattacagaattggcggacctgctaagcaatatgtaagaacatcaaactttaattagaagttgaatatcatttacgacagcaacataatagttgctgtttttttgcctcaaaaaccatagaaaatcttctgtaatcaaggtaaaatgaaattgattttacaaatatcatggaggatgttggaatgagaaaacgatggacagcagctgttattgctgctttagttgccgtaagtactgccgcaactactgttaaggctgacgatactaacacaacagctaatactaatgagacgcaagtaactgcaactagtgaccaaactaattctgattcagataaggttacttataacaaggcagattatttgtctgctaaccctaaattagtgcgaattaagcatgcaactactgcttataaggatgctgcattgactaaatcagcacagagcgtaaaagcaggatcacactttttaattagtcgaattgttaaatctgacaaccaagtaccaatactaaagactagtgatggcttgtatttgcctgctaaaaaatctttggtaactaaggtcatagcctaccaaaatcctaagggttatcatcaagtacattacacacaagttaaaccatacggtaaggtgggttataacttgtaccgtggctatgagggtattaagacttggaaagtaatgcatagagttggtacttgggcaggtacgaattactataaccaagctacttataacgcagtaaagaacttccaacgtagtcaccacttgccagcaactggtaatgttaacttagctacttgggaaaagatgggcttttctaagaagtcatggtatagcattgatagttatgttgccccacttaaggcttatgcttggcaagggcgtaaagctcatattgaagcaatgattaatcaagcttacaaatatatgggaaaaccatggttagcaggttgttcaactagtccaagctacggtgttgattgttctggtttggtaatgcaaggtctttatgcaggtggcattagtccagttccaactagttcaatcggccacgctcatccaggcaatgaatggaattcacgtaatctttgggctgacaagcacctaaagcgtgttccatattcacaaagacaacgtggagacttagtgttctattaccaaccaggtacgcacactatttggcatgttgcgatttacttaggcaataaccgagtaattgaaagctggccaccacgtgtgatggttcaaccaattgttaattcacaaagaaatgtaattgctggtattaagcgaccatttatttaaggaaaaatatgaaaaaatacttagctattttattagtcagcctgggctttagttcattattgttaactcgccaaacagtacatgccgctgataatgatgatgccgcggcaactaatcaatcggctcctaagtatactggccttaaaaaagttggtaaacattatgtctattttgatcaagcaggcaagcaacgttttaaaaataccaagactaaaaaagcatattattggattaataaaagcggcaagatagttggtattaataactacgccaaggtaattagccaactacctgaaatgccaactggttgtgaaattactgccgtgacaatgatgattaattttgctggtaaaaaggtaactaaacagcaggcggccaagattatgccgcgcagctctaaccctaacaagggctttatcggttcgccttacaagaaatatccgctcggctattgggttgctcctaatggggtgaaaccagtagtgaagcattatctcggtaaagcccagaatatgactaattgtggtttgcccgcaattaaggataagctgattaattcacacttggtggttgtttgggtagggatgtttgacggcctctctaaccatgctattaccttgacgggttaccatggtaaaacgatctattataatgatccttggactggaaccaagcggaaaatcaagcaggaaatttttgcaacgcattgggctttagatgttcatcgggcgttgagttattaattttatgtaaatatatttactttttagtcatgttgatcaagccactttcgcagcatttcaacatattcatctgttttttctacaaaagacatgtgaccgcagttttcaaatagctgccatttactgccagcaagctgatcctgcatcgttttagctacataaggtgtacataaatcatcagtcccactcgtaattagagttgggatttttattttgcctagtttttctgtgtattcgtaatcgtgcaagttgccctctggcgtatattcatttggtccccaggcggtttcataagctacaataccaccacatttttttcgcataacgcattcaggccacgttttcgtcatgtcaattgcatgttgattcatgaagtgctcattagcttttaagtaatcaggatcgttaaaattgctagtcaattcggcgcgatgaattgccgcctgttcttcaattggcaagtatttaatcatccggtgtaattctttgctccataaggaagcagacgacaaggttgaagacaagatcaagctttgaatgccaacaggatgataatcacacatgtagattagtgctagcatcccgccccaactttgtcctaataaatgtattttgcgcaaagccaagtgctcccgcaacgccatgagttccttaacccatgtttctttagtataaagttcagggtgatcatcagggatgctactcttgccgcagcctaactggtcgtacatgataatccgtcggttatcaatttcggctaatttgtccaaaacctcaaaataattatgacttgagccgggaccaccatgtagcaatacgagtggtgtcttttcgcttcttcgaccaacaatacgatagtaagtttcatagcccatgaaaggcatttttccttcgataacttccattttttacctatttgaacaaaaacaatgagatattaaccaaaattagcagggtaaagaagattacccaatctctagctgttaaaggaatagcgatgatcgtcgaccttctttgcccttcgacatagccatgtgattccattccttgggccagattgtcagctgaatttaaagcaacaagaattgctttaaaatagaggaccggcgaccaaaaactgagataaatgccccgcatcatagcgctagttcggatctgtttaaccgccatcttcatctgcggaataatgttaatcgccgccagcacgccgtaggcaaatttactgggtaagtgcaggttctgctctaatgatcgggcaaagtctgtagcggtgttattacgtgtcacgcaggcaatcgtcaaggtataaacatagatacgcgttgacaaattccaagcataataagcatttggtgttggtgaaaaccaaaagagcgttgcaaagattgtaaaagcagcaataaagggcaagataatgagcaagattaactctttgattttgattcgagtaataattaaataaactagcgcgaaggtgattactaacaaattagtaactaagctagcttttaaagatatttccagggaaataataaatgctaaaagaaattttaaactaggattcataagcttatctttctacatattttaagcgctgatccgcaaaaatcaggtggtaatcgcaaaattcagctagctcgtctatctgatggctaatgataaaaaacgtctggtggagcttttgctggctttctcgcattaattctaaaacgagtttgaccgagttatggtcaagtccactgagcggttcatcaattaataaaacctgatgcttagtcattagcattaatagaatctgtaatttcttctgttggccacctgagagagaataaacaacttggtctaagtgtttggctaaacccaatttatctagccattcattgaccttttcttcagtaaaaaataaatttctatcctttttacttaattctagttcatctttgacagtcacagctaaaaattggtcgcttgctttttgaaaaatttgagctacttgtgttaaatattttctagctgagatttgagcgatttccttatttaaataagcaaaattaccagtatacggaatcattttggtcattactttaaataaagacgtcttgccaacaccattagcaccagtaattagggtagtgccagaatgcaaatttagctcattttgcttaagcaaaagcttgttttgtctaatttggacttgttttaaagtgaaaataggctcactattaggtaagacaaaatgataatgtcgctcatgcaattttttattttgttcaaataaggctatttttttgctagcatttaattcaataacttcttgattatttgtaaactcaaaaagatggtcgcagacaggttcataatcgtctaaaacgtggtcacttaaaataatagtttttccgttgtgagctaaaatcgctaattttttaatcaaaaaagcacgtgtcttaggatcacaactggcaaacggttcatctaagagcaataaatctacatccatagctattaagacagctaaagcaactcgttgttgctgaccgcctgatagagtattaatcttttgatcgagaaggtctgcaatttgggtgaaagctgttgcctgatctagtcgtgtttgatactcaccttcatctaactgtaaattttctaaagcaaagacaatttcttcacgtggagttggcattgtaaactgttcagccgcattttggaacatcattgccgccttttgtccgtgcaggtccaccatacctgttagtcgccctgcatatttgggatacaaaccagcgataattttgagtaaggtagatttaccgcagccggtcggtccaattaacagagaaaaaccatggggaatttcaatatttagatgattgataataggttctttttcataagaaaaagtaagattgttaacggttactttcataagcttgattgtacaagatgctttggggactgtctacaggtaaagtttgttataagtagaacaaatcataaataatacttaatactaaataaagttttgatttataatgtaattatagtgttaccatattttatttaatttaagtcatgtggtaataagtcaaatgaaaggcgatgatatttgttctttttgatcataaatttgagtatatgaaactaagccttggtaaaggttgatttttttaatgttaaacttttgtttacttttaaatttagaccaatttttgaaattaagacctcggtgtcctgtacagtttgtcatctttgagcaatttaaagataactcgtactaattttcttgcagttaatgtgcaagcacgtttatgcggcgagtagacagcttcatcatacttcttttggtaatattttttgaaaacaggatcatgtaatcttgctagattggcagcttcaatcaagtaatatcttagatatctgtttccagtcctggccattggagtatgttcgttgctgtgatctcccgattgatattgattccaggttaggccggcatacttagccagctgttcttctttatcaaagcgatcgatacttccgatctcagcgataataccagctgtataggttttgccaataccgggaattgattccagaattttgctttctggtaatgcatcaacgatacgatcaattgctttttctagatctttaatagattcattaaagctttgaatcatgttgtaatgaacagaaagcactgcatcaattgaatcagtcattactttgcctaagcgatatgaacctctaacagctttcttaattgctttagccaaggtatctggatcggaaaagcgtcctctgcctttaacctgtaagtaagaaattaagtcttcggtaggcatatccgcgatctcatccagagttttactatcggttacaatagacatcattgtagcaccgaaaagaggagtattaatcttatctttatcgacagtgattagtttattaacccgataatataaagcttcaatgaagtgctgtttggtacgagtcagttcttgaactaattcatatctggtacgcgttaaacgctctaaagcaagatagttctcttgtctggcaatgcttactcgataatgtccaaagcttagatacaaagcaatgtaataagcatcgagaggatcagttttactttcttcaaagactttatgaaacctgctggtttctttggggttaattacatcagtctctacattgagcttttgtaaatcttcgtcattttggaaaaagtaagcaggatgaaaactgtaaatagatgtagcttccatgccaataatgatttgatcatagtgtttattttgagctagatctaaaatttgttttttcagttcactagcaccataaagatcattgacaaagctatcgttaattaagcgtttgttttgatcttctgaatcaagtgcaacgacctgtaaatctttagaactaacatcaataccgacaaataatttcattggaaatggcctcctttctttcaaatttctgatcatagattttgatcttcacatgttaacccctaattacagttcttaagttcaatctcgccagtataagtattcactggttgcttctttgaaagctgcacctaatcccaattgctcaaggactagcaaaaagaagcaatcaatacagcatgtgagttagagcataaaggaactgtctgggtggcagacttataaagcagacaaaactgcaggaggtgataacctagaccagttgaccaaagccaatgacaattagaggctaacatgtgaagatcaaaaagcaaatactaatttgattaattatcacaatatgactaattacaatttatataatacgaggaaggtggacatatggcagctgttgctttggaccaatatctggcaagtgtattaaagtcaaattcaacagataagaatgaaataaagttggaagctggtaatccagattttgatctgtttactatctaccttgaaaatcataatactggtattcatcgctatcggatggatgtttcaacgattttatatattgctaagggtactgtgacaattaagagtggtgaaaagatcattcaaatgaagtctgggaatgttttgctactgactgaaggttgcaagtatgagattttaagtcaaaaacctgatacggtactgataaagttgaagtttaagcgtggatttctatatcgcaagtattttaaagattttagctgtaagggagaacgtgaggttaaagttattgagcaaatcgttgatagcttagaaaatgaacatgttctttggctaaaaaataatcaaattactcgtgcgtctcaagtgatgcaacatattattggcggttatttgaataatgatttgtttactaaagctttaattcaggctgagttaaccactatgttgattatttcaattagaactcagcgcatggcaacaccgactagtttggataaaactaagtttgaaaagaagaccttagataattacatcgatcttcattttgccgatgtctctttatctgacgctgcaaaatactttggcttcaatcctaattatttctctaatatggttaaggctaagactggtaagagttttgtagatcacgtggatgatcgaagaatgcaagaagcacgtgaattgctggctcagcctgatatttcacttagagagattattggtcgagtaggatattcgagtaagtctttcttttataagaaatttaaccaatactaccacataacaccagcagcgatgcgggcagaattgtttagacaagcaaatatcaatttaaagtaaaaaaataatctggacgaaagttccagattattttttacatattttctaagcgtttaatgcggtctgctgttggtgggtgagtatcaaacaagtgcgtcaaaccgtgattgtggaatggattttcaatatataatccagcactactactatcagctactttcattggttggctattttcaatcttgtgtaaggcagaaattaagccttgcggattacgtgttaatttaactgaagatgcatcagctagatactcacggttacgtgataaagccatttgggccaaggatgcagaaagtggacctaagatcaaaacgaagaccaaggcaaccactttaaaaatcatggctaaagcattactgtcacggtcatcgtcgtcatcactgcgcacgccgccccagaaccaaaaattggacgccatattagagataaaagaaatgaccccaactaataccacggcaattgttgaaagtaaaatatcgtagtttttcacgtgtgataattcatgccctaagacgccttcgagttcttcacgatcaagtaattctaaaattccttgagtaactgccaccgcactatgttcagggtcccgaccagttgcaaaagcattgggactaggatcaggaataatatagacccgtggcattggaacctgtgccaccatcgccatatcttctacgatatgccacagttccggattgtcggcttcatgaatttcttgcgcgtgattcaagctcataatcatgttggctggattttgccacatgatgaataagtagactaaactaccgatcaaagcaatagtaacgcccattgttggactattgctccaaagataaccgattcccgcaccaactaagcctaagatcaccaaaaagatgaacataattaacgccgttttgcgtttattacgagcaatttgttggtaaagcatggttaaacttccttaaaattaaaacttaacttgaggcacattcttttcttcactaggagtttctaagtagttaatcttagtaaagtggtgccacttggcaacaatatttgatgggaaagtaagcaacttttgatcatatgttgctacagttgaattataaagttgacgagagtaagcgatcttgttttcagtgttagtcaattcttcttgcaattttaagaagttttgattagctttcaagtctgggtaggcttcagccaaagcaaaaattgacttcagagaatcagtaatttggttagaaagcttcatcgcttcttcatggttaacttgaggcacattaaccaattgattacgtaatttgactacttcctcaaaagttgatttttcatgcttggcatagcctttggtggtttcaaccaagttgggaattaagtcattccggcgcttaagttgaacgtcaatttgactccaagcttcttcagcatagactttcgctctttgtaaaccgttgtaagttactatgtagatagccacgattaaaacaataatagctaaaatgatccaaattaaaggtgacatagtttttcctccataaaatatttatttaattttatcgttttcgaatttcttgagcaataaaaaagaatgtcaaagcggcattcttaacaaaaaatattaaattctgaagattaatagtaataatccaactgcagttaaaataatcaaaccagcaaattgcataatagtccattgaataaaaaactttttcttacttacgctaccgtgttggttgaaagtcttaagaactaacatattagccattgaaccgatagcggaaccaaaaccaccaatgtttgaacccaagaataatgcttgagcataagtggtaaatttaccaactaaaatggttgatggtacattgctcattacctgactagagataattgaagcaaagtaagttgaaatttcagaataaacggtgccatgaattagatttacgataagagggatttgttggatatcgctgatgaagatgaagaagccggtaaaggtaagaagtaaggcatagtcgattttgagcataatcctaggattaattgcaagggctaatgcaaccgacgttagcatttgccaaataatatcaatggttctgaaaacaccaaagaagaagaaaataaagacagcagtagttatcagcgtcgggcgccagctgatcttgattggctcagctttttgcaccggaatttcttctttaggaataaacagaaagactaatcccatgattagcattgaaactactagataaggtacagaccattcgaaaaattttaatgggctgacatcaaagcggctgactgagaaaatattgtgggggttgccccaaggcgtaaatgctgccccaatatttgcgcccatcccaatcaaggtaacaggcaaaatctgtggcaatttataacgcttagcaatatttaaatacagtgggatcaaggtcaatgcagtaatgtcattacctaaaaacatccccgaaatgacagccaacaacgaaaacagcgtgttcaacttacgcgtattatcggcaatacttgtaagcttgtacgctaaaacatccagaacatgcaagtatgcatagatctggataatcgttaacatcgcggcaacagaccataatgtatggaagttaatgtccgcaaaccgcggtctggcaaaaaaaagactgactactgtaatgatcacagtaatctgtaaaattctatctttagcaatattctttaagacggtcataaaaggtcccccttacgtattacaatcgtctaaaaaccctatgtaccattttgagcctttttgttattgcatgcaatgataaatttaaaaaaatatcaagattagcggtatttttgagcatatttttagttagttggaactagtcgtgctatacttaaataagtaagttaataaaatttagattgaaacgaggaaacaaaatgacagagaatgcaatttcaatcaatattaaaccagatgctgcagaaatgattaaaagcaagatggatgcagatcaccaaattgttatcttggctttagatgatggttcaaccaagtattctaaaaaaggcggcacttgtactattggcgacagcttccagtttgtaatccttgctgaaaaagatcctaagtataatatttcaatcgaaaataatgctggtcttgacttgtatactgctcagccggaaacaactttctttgaaccaggtctagtggtaaatgcacgcaactcaactttgagtttatcttcagacagcggcattattgatggtgggatgaccgttacccaatatgaacctgaagcaattactgctgatgatctaaaaaacggcggtcaatgttaaaaaaataaaattaatcatagggacgagggaatgacctcgtccttttttagtatagaattaagaaagtgatttcaatgtaaggggggaagaacaatgacttttgtcaaagaaataaaagcaggtagtcgtgaattttgccaaaattggctgcggtatctgctactttttatgggattaagtttatttaatcaatttattgttattccactttttcgctatattacaacctttgttttgcaggctagtgctattccgttcgtatcttatcgaaatgtagtgacgatcattacgacgcatacggttgcctttttaattttgataattgagttgctgcttttattagtaatcttgtatgcgcaattagcttatttacttcatggcgtttgggatattaagcatcaagtttttacgtggaaaaatagttttattcaaacttggcaaaatatcaaaaaaattcgtttgggcacgctttttattttgatgctctattttttattggtagtaccgttagccgatgtcatctttagaacaccacttttaagcaaagtgcagatttcagaatttatcttggattatctgacgagaacgccaatcttgttagccgttttgattgcgttttatttagccgctttgatccttggtgcaaggctagtatttgctttacccatcatcgtttttgaccacttaaagtcagtgcaagcagtaaaaagaagttggcgattaacggcgcactaccgttggcggacgatttgctggaggattattgttttagccgttttatctgcagcagtcatgacaattttctatttagcaatgtattgcctgcagctattagttgatttattacctgggaaatgtccgttaattttagccattagcaatctttcgcttgttcaaattattagtgaagtagcgttagtctatgttagtgtactgggcttatctattattttgaaagctttaaggcaagaaaagataagtcaaacaggtaaaactaaaaagataattctaagtacattagttgtgtttgtactagtaatgattaatgcaatatctaccaattatttatatttgactagtgtaaatgctaaagcgccagtaattatttctcatcgcggcgttgatgataaaaatggcgtacaaaacacgttacagtcattaagaaaaacggctaaagaaaagccaaactacgttgaaattgatgttcatgaaactaaggataaaaaatttatcgtaattcatgatgagaatttattgaagctaacgggagttaataaagccccgaatgatttaactttacggcaattagaaaagttaactgccaaagaagacggctatcatgctaagttagttagctttgatcaatatcttgaggaagccaaaagactgcatcaaaaattgctaattgaaattaaaacgacggctaaagattcgaagaaaatgctgcagcgctttaatcaaaaatatggcaaaacgattcttaaaaatgcgtatcaagtacaatcactcgactatcgcgtggttgaaggactgcacttaattaatccacgtttggttgtcttttacattcaaccttataattttacttatccgcaaagtgttgctagtggatattcaatggaatattctaccttgaattcagactttatttggcaagcccatttgcaggatcgtcctgtttatgcctggacagttaatgacgaaaaattaatgaagaagatgatgtatcaacaagttgatggcttaattactgatcgagttgatttagctaaaaaggcaattaaaagtttccaaaaggatgctagttatgctacgcgaatcttaaattatattgttgtcctgcatctgtcgaaaaattttgaatctgcatgaagacttgatctgaagggctggacatggtaaactatactagattttcgaaaatctgaaaggaagtatagcatatgcgtaaaggtgaaaattacaacactggttgtgaaccaaaccaaagacctaagaacaagagaaacgcaaagaagcgtgttgctcacgtagcagcagttgttgctttcttgaacaaggccgcaaaagatgaaaacaagtagtctttaataatattgaaataaaagctaggagctgacgcctctagctttttttgtgcttactgaaaaaattaattctaagtgtataattttttacggtaagttgaataaataattaaaaaagcccaagtcctttgaatttggacttgagctcaaacaaaaagaccagtagtctgatgttaagaacaaaaaacacattagaagctggtcttttatgaattcaattgtaactgaaatcgcaaatattataaagtctgaagataattatattaagcgtgaaagaaaaataatctgtttcttcttaaacctgattaaggaaatcatggccttggctttagctaaagttgatgatgaaatgattaccaaggttaaagcacagcaagttcttagttaaaatcacgccacttaagcgttacccaaaagttacgttagttgtaccagctcataatgaagaattagttattagtaaaactacgcaggcaattttaaatttgaattatccggctgataagttacaaattttaatctatgctgataattgtactgatgatactgctaaaattgcccgggaaataatcaagcaatatcctgaacggaaaatcaatgttcaagtaattgaacgaacaggtagtggtggcaaagctggtgtattaaatgatgctttgaagattgcccaaggagaataccttggtgtatatgatgcagatgccatgccagaagaaaatgctttgtattttttaattaaaaagattttggaaaatccggtgagatataaggctgcttttggtcgcaataagacgagaaatgcgcggcagaattttttaactaagtgtatcaatcaggaaattgttgttacccagcgaattcaacactgcggtatctggcaattatttaagattggtcgtattccagggactaactttattattaatactgattatgtcagatcaattggcggctggcgcaatggcgctttgaccgaagatactgatatttcttttaaaattatgggctcaggtagtttgattgccttagcctataattctgaagccttccagcaagaaccagaacgcttaaaagattattatttccagcgcttgcgttgggctaaaggtaactatgaagtggtgatcaataatttttgccatctttttgataaaagcaactggcgggttaaattagagactgtctattattcctgcacttttttctggtttaatttggcgattgttttatcagatctgatctttttttctaatttgattgccttaatcgtccatctttggaatcctgcagtagtaataccatttacaatttcgcggagtaatattttattagctcaaattctgctctttaattggctattgatggttttgctttatattttgcaaattaacctagctatgactacgcaatatgggcaggcaactgacgaacagatttggctagccttagcatcatattttacttattcgcaattgttcatcattgtatcaattcatgcggttacttcagtaatgctagatcgcgtttttcatcgtgatagtactaaatgggttaagactaagagatttgcggattaggtgatgagatgaaaaaaagatggatgctactaggatttttactcgtaacgattgcatttaccggtattatgatctatatcagagcagataataattcagcggtgcgtaatttttttctacattcttggcataaaaattatgtagttgaagaaaagaatcttgcctatattaataccacgcctaagcaggaacaagtgacggttttatctgaaggccaaggatatgggatgtttattgcggcgcatgatccagcagttaaagaaagcaactttgctaagctagtgcagtattatttaaaacaccgggatcgtaatacgcaattgatggcttggcggcaaacaaagaaaaatggaaaatggagcagtgaacgcaatagcgctactgatggggacttatttattgctaaagctttgtttttagcggctaaaagatggaaaaacccagcatatcagcggcaagggcaaaaattaattgccgatattttgcgttatgaatataatccgacaacgcacgctttaacggtgggcaattgggccgattctaagccgaagtattataatttaatgcggacttcagatgtattgccgacaatgtttgatcaattttatcgtgaaagcaatgattcgcggtggctcttaattaaaaaaacaatgctcaagcggctcaatcagttgagtcaccagcataagagtggcctagttccagactttgcctggctgacatcaaaagatgctaagccagttaaaggaagggttaccactgatcgatatgatggtgattattatgccaatgcttgccgggtgccaatggatttagcatttagtaaggataaattagcaaagaatactgtacatcgcttgcttaaattttttagcaagcaaaatacaattacagcaggctatactttaaaaggcaagccggtcaataattatcaatcagctagctttagcgcgccaatttatattgcggtgaatgaaaatcgcaatcaaggctatgataatttgtttgcttcgcagcaatatatttttgctaaaaaattacctaaaaataattactatgatgcagcactaacgacgatggcaacgatactgacaccggcgcatagattttaagaggcaaaggcctctttttatttgcattgaaaatcaatctttgataacatagtaaaaattttaaggaaaatgaggaggacaaaaaatgggattaaatgcatacattcaaggttttaacagtttagagtcaattgatcgagcaccgggctacttcaagtatcatcaccactcagtagctgaccactgcttcagaacagcggaattagcacaaatgatgggagatattgaagaagtaaagggcaaaaagaagatcaactggaaggctttatatgaaaagagcttgaatcacgattatactgaacgtttcatcggtgatattaagacacctgttaaatacgctactcctcaacttagaaagatgattggtgacgttgaagaaacaatgaccactaagttcattaaggatgagattccagaagaatttcaagaaatttatactaaacgtctctcagaaggcaaagatgatactttagagggtaaaattttatcaatctgtgataaattagatttgttatatgaagcttatggagaaatcgaattaggtaatcctaacccggtttatatgcaaatgttcaaggaaagtcttgaaacgatcaagaagttcgacgatttagtttgcgtacaatactttattaagaaaattttgccagatctttttaaaggtgatttcgcgggaaaggataagatgcaacgaatagcttttagcattctattgttaggggatgattaggtgaaatttcaatgtagttcatgcgggctgcgcatggactctttgcattttaagcaagaggggttaatgaatcctaagttgaccagtatttgcgacatttgtatcacgcgcaacctgaatccggaagattacgcaaatgatgcggtcgcaacttttgctcaaagcttgctttacacgtttgtcggtgcaaagaaacaagatcaatcaggttttattgtgaaaaataaaaaggaccgtaaaaaatacgaggcctttttacaagattatgatggcaatgaaatcgcccgccaacagattaaaaggtctgatttgaatttggcggtaattaaaagcgaagatggcaagcttaattatgtgcctaaccaaggcgtaacttttgagcaaaatttaaagggaatgggtttggagatcaatttccagttaaacgaagttgattttattgatcgtgaacgcgttcgggccaagtataaataccgctgccaatattgcggcagacgtggccacagcgtagatcataaggatcccgtttctcttagtcacaacaacagcttagataatttaactttagcttgtgcggaatgcaaccgaattaagtcggatatgccttataagttgtttattcaactgaatgatcaaatttctgagatcaataaaaagctagttaagtatgaagatgcgctgggtactttgagagaagaatttgagcatcgtcggcgctatttagcggctcaagtacaccttaagggtgtgatcaatgatcctgagctaaatgcgattagaaagcaaaataagagcttacaggatgccattgatagtttacaaagtgattatgatgatttgcgtcaaacgcgcaagacgtattttgatacgggctggaaattagctcgcattaaggaaaataaggatattatttaaaacgtaaaaaagcgctattttttgtaaatagaagataaaaataattctgagtttgcaaaaaatagcgttttttttgtaaactcaattcaaaatagaaaatgagttttaaaaagatcatccccatataggcaatgtcattaagttaagacattgacaaattatcgacttggacttttaagatcattcatttgtgatttatcgcatttgaatgatcttttttcatgccaaataaacccaaattttgtttagaaattaggctacacgatataaataatatacagctgatttgggtttgagatttcttttgtcttttcgtcctggtctgatcggaattgtgtaatgactaatttgaataagaatctttttaaagatttcagttgaagaagaaattatatacatagcctggatgacaaaacatgactgtttgaaattgatcgcatattgatacttgcagtttttttgtggtacatatgcttgagcatcaatttgactgactgcgttaaacataatcatgtgggcatagatctccatttcaataaatctatcctgcttggaatgaaactgtacgctacctaaagcatatttcaactttttgaatgaagtttcaatgccccagcgcaaatggtagatctctttgatcctttttaagggataatcggctctatttagattagttagaacaacttcccattcttctttgcctgatttaggatcattaattctaaatttacaggcacgaaattttattgtacataactctccaaagtcccagctgccatctttggtatttttagaccgatattttatatattgacggtaatgatggttaaccaaatgaacgttttctgtagccttatgggtttcataataataattagaggtagtcacccagcaagctatatccttatcacactcttgattaggcaactcagctacttccttaaatgcgccatatcccgttttagtacgtatgacataataacagttaggcaggcgattacaattttcaatcatgttaaagccggtataacctcgatccatagtaactatatatggtccgcaatttagctttttaagcatttgaacggcggctttacgttcatccatctttgacttaggctgaaagatgcagtcttgataagtattatttaacaggtcatagagtgcattaacatgaatttggcaatatggctttcctttatgattgagatttccaacgatattctctgatttaggattccagatttgattaaaatcagacccatcaatggcaaatatacgatatttatgatcaaataactggatattaaataaattctgattaaatacagttagaatatgcttaaaacatgcgggtgaaagctgacctttgcgttggacataagcggaagtactgactactttatcgttatttttaatagctttttggccaaaagctctaaacaactcactggtcaaatcttttccttgcatattaatagtagttttaatgactgtagctgcatctaaaaaccgcttcctagtgaaggcatgaggatcatcgataaaatcatgaatatgctttccagtatcattgataatttgatcaagacgatctaaaatatttctgtgaagggctttcataattaacaccagctttctggcaataattttgaaggtttaataatttaatcagagggcgaaaaggtaggttcttttcgcctttattttatgcaaaaaaagaaccaaatcataatgattcggttctacagagattagattcaatttgtcaatgtcttaacttaatgacattgcccatataggaatgatctttttaatttttatctatctaattcgatcttctggatcaaataaatatttgtcccatttaacttcattttgaacagtagggtggaagagcaagaatgctagcaacagttgaccaacgtaaggaattacgcccagccaccaccaaccaccgttaaagcctgcgtcgtgcagacgacgaacagtgtgacctaattgtgctaaaaaggcccaaatagctgctgcaataaagaaaataataaaaatgatgaagattacaccgattaccttggcatcgccagaatcaaatttagtaacgctgaaaggagctaaaagcatgaaagcaagtaggtaacaagcaagtacgccgattgtcatgataacttggctaattgcagtacctacccagaatgaggttctagtagatctaccatcccacttaaagcagtcaaagaagtgttccttcaagatttgaccaatagttggtacaggaacattactttttgcgccacccttaggataatcttgatcgctgaacaagtatttgccccacttaacttggcgttgaacagatggctgcaattcaagataaaataaaaacattgcgccataaccagtgaaggcagcccagtaccaatagccgctgtagccaacatcgtgcaaacgtcggatcgtttgtcctaatgcagctaaaaatagccacagataaacaacagccgcaacaataccatcgactattctaatgccggggttgatgttttggttaaaagcatagaagccaagaaggatgcataagatgccgataacaagattaatcaaagtgctccaccagaaagatttacgcgtagttcttgctttccagttgaagggatgcaaataagcctcgttcaaaatttgcgcaaaactttctgcaggcggcagtggcagactttcgtcataaggcttgataaaataatatactctatcattcattttacttcctccaaaaattaatttgttataaattatacgctaaaaaagccgtgaagcaattaaacttcgcggcttttttgatattagaattcattatttctaaagttgctcaagaacttttgcgtcttttcattcttaggatggtcgaataattcttccggtgaaccttgttcagtaatgataccgtcactgatgaacaatacacggtctgaaatgctcttggcaaagcccatttcgtgggtaacgatcaccatcgtcaaaccggttgtagcaagcttttgcataacgtctaatacttcgccaaccatttctgggtcaagggcactagttggttcgtcgaacaataaaacttctggattcattgaaattgcacgggcaatagctacacgctgttgttgaccaccagataattgttgtggtttagccttgataaatggatccataccaaccttttctaggtttttcatggcaatcttgcgtgcttcgtcttttgaacgcttcaagactaattcttgaccgaccatacagttttctaagacgtttttgttttcaaataagtcaaattgctggaaaaccataccgacctttgatctaaaggtgttacggttgtagccgggatgcaagatatttttaccgtgaaaatcgatctcgccgccagttggttcttcaagcaggttgatacaacgcaaagtagttgatttaccaccaccagaaggaccaatgatcgttacgatttcgcctttattgatgtcaaaggaaatatcctttaatacttggtgatttccataagacttttgcatgtgctttaagcttaaaattacttcgtttgattcagtcattaattatttgcctccgcatcttttggagtaccaacttggacttggttagccatcaagttgtaattcttattaccttcaagtctcttttcgataaagttgaagattctagtaatagtaaaggttaagatcaagtaaattgctgaaatcattaagtaagttgggaagaacttgaatgattgactggcaatagtagtaccaacgaagaacaattcagaaactgagatgatactcaatactgaagtatccttgatgttaacgataaattcgttggtgattgatggtaaacagtttctaatagcttgaggcaagatgatatgccacattctttggttgtgggtcataccaagtgcactagctgcttcgaattgaccttctggagttgaaataataccaccacggataacctcagctaagtaagcaccagtgttaattgaaacaataatcaaagcagctacagttctatttaaattcaagtgccagaattgggcaataccatagtagattacggctgcttgaaccatcattggtgtaccacggaagatttctacataaacagataataaccacttaactacgttcaaagtccaacgcttgccgcgagtagttggagtaggaatggtacgaataattcctacaagcaagccgataaagaaaccaacaatggtaccaactaaagctaaaagcaaggtcatgccaatacctgacataatcatgccaccatattgcttccaagtagtaactagccagttttctttcttagtttcgttaccagccttaggttgttccttgatggcttgtgacattaattgatcacgctttttattagaaatagttcttaaagtagcgttaacttcatttaaaagcttggtattaccctttttaaccccgatactagttacggaatcgtcatggtcaactttgaagccagccattttgtttaagttaactgcaataatgttagggttaacgttgtggtaactttcaaattcaatatcttcagcaacataaccatcaatggtgccagaagctaaactttgacgcatggctgagaagtcacgcatagctggttcacgcttagcaccctttaattgcttgattaaatcatagtgcaaagttccttgttgtgcagttaacttagcacccttgaaatcagtcaatttcttagcgttagaatacttgcttgccttgttagtaattacgacaaaagtactcttacggtaaggttctgagaagttgattgccttgcgtctttcagcagtaggagacataccagcaataatcaagtcgattttgcctgatgtcaaagctggtaaaaggccatcccattgggttttttcgacgattacttttttgtgcagtcgtttaccgatgatcttggcaatttgaacatcataaccattagcataggagttagaaccatcaattggaacagcgccattagctttggttggctgagtccagttgtatggaggatagtttgcctccatacctatttttaacgtgccagaatctttcttagcagcttgagtctgattgctactaagagaaaaaccgataaataaactgagtaggacagacattattacagccatccatctaaatcttgacttcaattataaaacctccaaaaatagttttaacataaagccaacacaataaagagtaaacaaaaacctcgctcttccaaagaattgcgagggtcataatcatcagtgtttaaaccaaatcttatagcgctccctggggactaaccaggacagtctatagaatattcttctatagcccaacagattaacacgcgaatattaaatctatttcggcggcaaccctaagttaactatcattgttttcgcgaactcaaacttaacttgtgattgtcgcaacctctattgcattggaaaaatatttaactaatgaagaatactagaagaaaaagttaaatttgtcaagcccaaccattattagtttcataatttctctttttcatatcagaaacataaggatttcctgctacataaaaacgtaatttcttgttagcccaaacgggatcagattgattgataccaacacgcgctgcagcaattatttcctggggaatttttttatgacgatcatcaagatcaatggcaaaaggggagtctgataaaaagtgcaaattccaattcttatcatgaataccaaaagcttgcatcatttttgcgggaccattagtcaaaagaacgccatctttaccatgacggttcttgatcatggtctcaattcctaaagtgggatcgattgcacggattaaaacaccctgtggttcattctgaaccctagtggcaacatcaaagaaaaaatattgacgttgcgcgtagatatagatcgttccgcctttgccgtaaagtccttcattcgctgggctacgacgaccgccataagaatgtgcagcgcgatcctttttacccatatatgcttctgcctccacgatatagccgcctaatttttcttgaccattatcaaaagtaagcattcgcccaattaggtcttttgcaatataatcggtagtgttagtagaaaaataagttgaataattcatttttgacctttctagaaaagagataaaaaataatgacagaaattaaattagttcgaatttatgaccatgagcaacctgctggttatcggattttagttgaccgtttatggccacggggaatgagcaaagttaaggccgatttagctgaatgggataaacaaattggccctagtaaggaattgcgtcagtggtttaatcatgaagataaaaaattccctgagtttaagcaaaagtatattgaagaacttaatcataatgattatacagcggaatttttgcaagatgtaaagaagcatttggctaaagaagatgttcttttcttatttggtgccaaaaataaagagcacaaccaagcagttgtactcaaagaatatgtattaaatacgctaaacagttaaatatgtttgtgaccgtgttttttaactttccaaaagtggaagagaattgtcaaaattaagatcgcaaagacaataattgcaaaaacggtgtttggcaactcaaatctcaatggtggcagagctagtagcaattttaaagcgatgattcctatcaataagtaagccattggctgcaattctggaataatatccattaatttaatgataatttcggcaactcctctcatacagagaataccgatcatgccaccgattaaaacaacaacggggttatcagacacggctaaagcagctaaaacagaatcaattgaaaagacgatatccattgattcaattgaaataaccgtacgccagaaaagagatagcacatgtctctttttctgtttgcctttgtggtgagctgcttcgcgctcttctttttctttctcatgttcggcagcttgtttagggtggcgttgatcatagaagaatttaaaggctaggtaaaaaagataaatactaccagctaatttaatctcccaaaagttgatcagataagtcccgattccgataacaataaagcggaataaataagcaccccacaagccataaaccaaggacttgcgttgttcagctttattaggtagcacctgtgtctgtgcggccaaaacgacagcattgtcgactgataacaagcattccatcaagattaaagtcagaatgatcatccagtctttgccactggttaggacatgtaaccagttattgccgtcaaaaaagggtgcatatagtttaagaattgacatgtagttgcttcttttctaatttaattaatctgattttttctttttgtcccagacgataagtcccaactttattgttggataaaataactctttggtcaggaataaaaatcaaaacagggtttaatgctacggcgtgtgcaactgagcgagaagatgtggcttcggctagtgaattggcgacgtcaccataagttaacgtcacaccataaggaatatgctggacaacgactaatacctttcgttgaaattcagtgccgaattccgaaatatcaataggaacatcaaaattctttctgataccagcaaaatattcctttaattgtttgatatgaggtgccatctttttagggtcccgcaccaacatgcggtgagggtagaagctaaaaataggtgaaacagtttcatctcctttaagtccgacgtaagttaggccggcttctgaagctgttaaaaagtaggtccatggctcaattgtaacgtaatcatagtaaaaaaactctgtcatgtgtaacatctttattaaaaataattagtctaagaataacaaactaggaaagttaattcaaattctggaatgctgttaatgcatccccaattatttgcgtgacaccaggggtaggaatttctgtcttgttgatagagtaaattttggcgtcttctttgcgataagccaagagctgggcaaaaggataaactacaaaactcgtcccacaaatgatgatcaagtctgatttttgcattatttcaacggactggtttaatactttcggatcaatgccttcgccgtataacacaataccggggcgaataattccgccacaatctttgtgtaaatagcttttagcatattcttcataagaaacaggttgatgacatttagtacaataaatattatataaattgccatgaaattctgttacatgttgattgccagccttagtatccaaagtatcgatattttgggtaattaaattacctttttcattacaaaaatgggcgattttttcatggattaagtttggtttagcagtaggaaagtacatattgttcatgacaaattcatggaaaaattcaggtcgattgaatagcgtactatcgctcagtatagtttcgggactttcttgcacgccatcatagattccgtttttagagcggtagtcagggatacctgagtgggtagaaacaccagctccagttaagaatacaatatgttgggcattattaatatctgtttgtaattctgctaaatccatcatataatgtcaccctccgtgaaagtcactactttaattataaatcattgttttgttataatgactgaaaattgaaagcaccaaaatcaagctcaagtcctgtcactattgagctttcttagacgtaattagtttttatatgatctgtttcagtgcaatttgtatgaatcgtggcagttggttaataaagtcattgattacttcatctatcttttcaaaactattctgtttaagctcttttaattctgaaattaagtagaccaatgcatctacgaatctaatatcaggtaaggattcgttcattagatagaataaatctccgattgtcttatcatctgtattttgtctttcctgccaggtcaatagatcataagttattgctgtaactgcgatatagccacattggccatcatagctttgaacttgagatttatctaaagcaagatattgcttagacgtcttaaaatatgtttcaatttgccatctacgaccataaagttggatgatttcttcagggctaagctttgtctgagtagtagctaaaaccaaatacttgttcttgtttccacggttggagacaaagacgagctttaataaaaagctatgtccatgatattgagcctcaactatgcttgaataaagataatgtttctttttacggatgtttgaagcagccaaacgatcatacaagtctttaacgctatagcggcgatggcgataaatgtaataaatctttgaactcttcttgatcatgccaagtccatctaaaccgatcttctttaaaatccaaaacattcttggagaagaaaaccaagaatcgaataagacgtatttagcttctactcctaatcgtaaggcttgtctaatcaactctacagttacatcattcatctttctctgagcttgatttctccttttaccagaaattgaacgttcatcagcagtaatgggagcagctccaatcatatttttcttggttttggttgacatcaaggcaaagttaaccggcaagaaggtattgccatcgctccagcctaaagttaaaccacgatatccgttcaaatactcatgcttgtcatggtcatagactttagctagcaattcggtctttttagaaaaagaccgagccatcagcgtatcgtcaacgataaaagcaagtcggcgtcttttatcgataaatggttttaagcagccaatgagccgggctgcaatcaagcataatagtttttgccagttgattcttccatcgttaagtacattgcgagcagttctaacggaaaaacgtttgtcatccttagctctgaataaagaaagccgagcaaaatgtactgacatcagccaagagataatcatggttaatgaaacggtggatttacgcttaaaattgacttgtttagttaacttagctagaccaattagattaataaatgaagaaattaaggatttagtatcattttctgtgtcgatttgttctatactgttcattgcgcaggatctcctttactttttaggtcgacacttaaagtataacgcagagagagcctgcgtttttatttttgataagaaaaagccaagaggcgcggggaaggagcgttaatcttagctttcaagtttcagtataatgattaaaataactaaattgaggggatttttatgaaatatatgacgtatttttatgtagcaattgatattttattagtagtttatgcttgttatagttggtattggcaagctaaagttgattttcgtggtcgctatcgtatctcctcagttgtttgggcgctaatttttatctggctgggctttacatggaattacattgaaaaaggtgatccaggcctgagcgtcttcttggctctttttatcttaattagtattgtcgatggtttttcaggatttagtaaaaagcggatggtcgtttcaggctacttcaagcgtacagttaagtatgatgatttagccagcgctactttaatccagatccccaaccaagagaagccattagtgatggcgatttttcgaactagcgatggtaaggcttatatgatgcgctttaataatgaagttaatagcgtaattaagcaattacaagaatatgctggtcgagaaattcctgtcgaagttcaatcaatgatgtaattacaaaattggagaaagcattcgcgagaatgcctgcaaagtccgcaatgcgcgactttgcttttttatttcttccttagttagtaaatgcgagtgtttcatatcttcttcaaaagctgccaccattttctggttgaactttttatcataaaaaacggcattatcttcaaagtttaagttgtaagaacggaaatcttgattcattgaaccaactgaagaaaaatggtcgtcgacaatcgtcgttttggcatgtaaaaagccatcttcgtagatataaattttgacacccaagcgagttaattcgttggcataccactgtgtggcgcgataaataaaggggtggtctggcttacatgggatcataattcgtacgtcaacacccgatgaggcaattgtttgccacgtagcaaaaacggcatcatcagggattaagtatggtgtttgaatccataaccgtttgcgtgccaaaagcattagccgcatcataccgttacgcatatatggtgcataacgatcaggcccatctgaaatgatttgcgttgcaacgtcgccttcgtggatgtttttttcatcaagatcaggaaatagagtggaattgaaacggatgagctgttgattattagtgatagaggcgttccagtccatgacgaaacgctcttgcaaaagcagagaggcagaaccaacaattcttacctgactatcacgccaatgaccaaacttcttttttttgcctaaatattgatcaccaatattaaaaccgccagtccaagaaattcgcccgtcgatgacaacaatcttgcggtgcaagtggtagttaatgcggtaacgggtgatcatgttgcgtgaagtgataaaaggcaaaacttccccgccagctgcccgcaattgatcgaaccatgctttagtagctcccattgaaccccaggcatcataaattacgcgtactttaactccttgttttgcttttttaatcaatagttgcaaaacacgattgccgatattgtcgctataaaaagtgtagaactcaacattgattgtttccttagctcgtaccatgtccttaagcatgtcatgaaagaaggtttcaccttcggtatagagcttgacctgattatttttagttaggggagcttcttgttggtggttaaaaaagttaattgctatattaccagcctttgaagtgtcagaaggactagtatttttaggtgctttagcaatcgatttttgaacatttctcaagccaatgtgtttttgcttattgatggcaaaaatattttcctgggaaataccccgaccaaagaaggcataaagagtgatcccgactactggtaatactaacaggatgattaaccaagcccaagtggttgaaacggatcttctacggtggaagacaacgtagaaggctaagattgtgttggtaatgataatgattctaacaaagtcatgccaccagatcataaactcctccaaaattaaactacttttttaatttaagaaacttgtcaataatatcgattacaaacggattgtcatgcatccaactatgttcggcgtcatctttaccgcgtacttctacttcttgataaaaatgtgcttttggggcaacgatatagcgaatgctttttgcggaaacaacagagatgaatttatcagtatttgtgttatctaaaacgttgccataaatattcaagactgagatatcaggattgaatttgcgccgattaaaaaacaaataaaggtagtgcgggttcatgacactaggccgaccactttcggtcaaatagttgacgttggggatatcgcccaagtaagtgaccccgtcaaaaggaccagcgataaaggcacatttttttaaatgtgggaacgttttgctgcggtagtgcttcatttccgtgcgaataatacatggacaagctaatgaatgagcgactgcaatatagtttttaaaaccatatcttttagctaaaaagggcaggacgaagttgagataatagtcgatgccatagataccgactattcgctggcgaaaagcaacctgcacgataggatgcttgtcactagtccaagttccttctaatttgaaatttcctaataaatcaacggttacctttaaaaacttgggattgcccttgtcatgagtagcgtgtttcaccatcacgcgagtggtataatcaccgccgcgaaagccatggaaataaataatgggtacttgttttagatcgcttttttcaatgtttgccttattttcaatatggcgcttgtgtaatttgaggaaaattcgcgtgggagcgaaggtggccatcagcccaaaagaaatcatgttaaacatgctaggttcttcttggaggtcatgtttatgatctttttcaacttcttcggcatatttttttgtgttgaaaaacatttttaccaccttctctttcttttttcctataataaaagttatgcaataagtatattttaccattgggtaaagattttggaattttagaggtagaaatgaagttttatgcagtcaaaaaaggacgtactccgggaatatatcggacttgggatgcagccaaagaacaagttgatggcttccctggtgcagaatataagtcatttgaacaaattaccgatgctacagattacttagattggaatgcccaaactcagagcgatgtcctgcaaaaaggtgaagataatttacaaaacgccgtaaaaagggtgcaacaaaagagtcaagaaataaaaaaagcaccgcgaaaaaaggcgaagcagtataaccatgttaatagcaatcctgctgacttctttgcggtgacttatactgatggtggcacgcgcaatactggtgtttataagggcggtcacgttaaaaagaccgataaagcagcctgggcttatttaattgaatgggatgaccagaaagttcatggctccggtggtgaatatggtgctactaacaataagatggagcagacagcattgattaatgcactaaaaaagctgcttgagcttggttttaacgataaacatctattatttgttcttgattcgcagtatgtgttgaatgcgattaataagcattggctacaaggctggaaaaaacgtggttggagacgttcttctggaccattggctaatgtggcggaatggcaggaattagatcggttattaaaggaatttcctgatagtacgtttgaatggacgaaaggtcacgctaataatcgcggtaatgaatttgtcgatcatgaattgaaccgttatatggatcaaaaaatgtaagaaaaaaaggctacactgtagccttttttaatttaaaataacgccgccgaacaaaccactaaagaacttaacgatttgatcccacaaattttgtaaccagttgcggttttcttgggtattaaatttattgaagatatttttagctccattttgaatctgactggataatttcgaagcctgttgcttgaagttaccgtccttcaatgcccctgaatcacgaatttcaattagaagattgacaatttgatttttttgattgttgttgatggtgtcacctaagtggttaatattaatttgattgttgacaatgtcgagaatttgactgtcggtaatgttttgcccttgtttagccatctcattcttggcaccggcaaccgcattgttcaattgagcatctgaataaccttttttgtttttattatcttgggtaatcccagacaaggtattcatttcatcttgagcggcattaacttgcttttgatttaatgcattgccatttttagcataggcagcataaactccagctaatgcccctgaaccatcaattggaatagcgctagtaacataaatgttggcatcgctgatgccggcggtcagggctgcgtttttgtactggttggcagtaatagtcgtgatattatttttaccatcgtagtctaaaattttaacgttgattccgctgcctgagctggtcttttggatcatcgcactggaccaaacaccggatgaagtggtgaaattatcaccagagggatttaaatatttaaccagatctgagccggtaacagtaattgtttgataattaccaccgtttagtggtgcagttaaggtctttaatgtaccttgtttttgtgaatcagttaatgatgtacctaaggtaactacaggtgtatcatcatctgctaatactggcttagtaaatgagatcatcgcgaccacgcttaataacattgctgtgagtagtgtgataaatttcttcattttttcttcttttcttcctttttgatcgaatatttattcttgtaatacggaacattatactaaatatttttcaaaagtgaattaaacaacacgtaaaactttcttaatttcgaccttattattgaagatggtataataaagagcaacaaagggggacaatatgttacaagtgcctaagttaaccatcatcatgcctgtttataacacggcgcaatacttgccacgtgcttttgatgctctgcttaatcaagttgacaagagcttcaaattgcttgtagtagatgatggctcaacagataattcggttaaggtagccgaaagctatgccaatcgttttccatattttaaaataattaaaaagaaaaatggcggcccatccgatgcacgtaatgttgggatgcagtatcttgacacaccatatgtcacctttcatgatggtgatgattgggtggatccaggctacacatccttttttattcatgcttttgaaagtcatccagatgtcagcttagtatcatgtggctattggatggattatcctgacaaaaagcaacgcgttgttggtcgaccagaaggtggctatttaacgcgcggtgaaacttatttgaagttgactaatgtctttagctcaccaatgaaaggatatagctggaacaaggcctataaaactgccattattaagaaatatcatttgaagtttgatagggatatttcactactggaagatcagatttttaacgttaaatatatttctgtggctaaaggcgtctactacacgcaaaaaccttattaccactactggcagagaaagggcagtattattcaccagcctaatattaaaaaagttgcggataatttccggggaaattaccgggtttggagcaaaattatcagtacaatgatgaaagaccgcgaggaagaaaagatgcgtaagaagttagagcgacagcaggccttgcgtgatagtgaataggggaaaacatgaaagaaaaagttaatggagtcgaaatttattatcataagttaggtaaaggtgagcctttgcttttactacatggacatcacttagatggtggtatgtttgataaaattgtggctccgctttccctttattacactgtctatgtgcttgatatgcgaggccatggtttaagtgaaggcgacatcgctgaacactacaagaccgaagtagaagacgtctatgcctttgttaagcaagtgggcattgaaggctgctactgctttggctttgacgcaggtggccttgttgccatgatgctggcggagcaatatccgactatttttaagaagatgattgtggccggggtcttcgttaacgggggcggaattcgcccataccactatttaactgaaggttttcatcgtttcttgaagctggaccgcgatagccgagtggaattgaccgaatcctttatttcagttgatgatttgaagaaaattaaaacgccgacgctttgtgtagttggtgaaaaagactgggttaaggttgagcatgtgcgctggtacagtcaatttatgcctaacgcgcgactagtgatcatgccgcggcagacgcataacagttacgcggtgcgcagtttgaagttactggatttgattaaaggattttgcagataaatgttgtaggacatctgagaagatgtccattttttataggtttggtaaaaaaggacgtaattgaaatgacgattggtgaagcattaaaggaagaacagaagcgattaggcctaacatctgaagcaatggctgcaggtgtaattacaaaagggacctactctaaagtggtcaatggtaaactgcgtttgagtagtgatctgttagttgaaattctttttaagcataacattgatattagtgatttttttgaaatgataaagagtacttatatgccaaaagagaaattaattgaggaaaaattgttttctgaaatgcaacaagcattaaataatcatgaggttgaaaaggcagaagaatgtttgacaaaaataaagaatcaaacatctaataaatatttacagcaacgagccgaaattacagttgcttacttaacaaatagtactgataaattaagtaaaaattttaaacaagctgtagttgatgagttgaataatcattctaattgggtaaaggatcttgatgcgctgagattatttaatacagcattactaattctttctagtgaaaaagttgaaattgaaatgaatctttttttcattaaattaaatcgtatcaaaaagatttctgaacagatggaagagagatatgcaattttatgttgtaattacttagattggaagtaccggcaacaaggtgaagtaaatgataatgttaaaaatgctttgaaatatttgagcgatcttaagctaacagctcattttgagagctataaggtttgtggaaagtattttggatatttatttaacaaagaaattgatagtgctaaaaatatgaggaaaagtttacttgcattgggaataactgttggtgttgaaaattggcccgtttaattttaatagtttcgtataagaaacattctaaaagctaaggcataggcaagtgtattatcaaataagacaaaaatgaaaggagatttctaaaatgatttactgggaattcccaattcttccagaaaactaagaatgtgttagttgaaaaacgtattttgcatggaggtttaaagatgcgtagaaaaaattaggaattttgttagcagcaactttgttagctacaacagtaactaatcctttagctgaagtggttgctgcagatgcagtacaacaacccaatcaaaaaggtattagcagtgaaaaaaataatgatattaagttatcacaagaacaaattgatcaatttgataagtttgttgtagtaaaagacaacagctatgtcttagattcaaaagtaaatcaaaatttttcaacaaatgaagttttagtggtaaaagaaatgctaaatacttcaaatcgagaagtgaaaaacaataatttaattatcgatccggataccaaagaaatccttgatcaaaatgcaagtccatttgtaattatggcagcgtataataaaaattatacaacgaaggctttttggtggggtaagcgatattactttacaagtaacatcgctgtaaccagaggtgctagatactttagacatatagcaagtttgagaaatgatcaatcgttgtttttaagtgctttaggagattccattgcgtatgcttctccgtatgctacattagcagctaatgtagcatcaatgggagtaggttatgttgcgggacaatataatggtgctgcttctgcgttggtaagctataataatagacatagacataatcaaatttatttggatatgaatagaacattccaatactctcttcatgtcttaaaacaaaaaggaaaaatgtatgtgggtaattttaataatcaatgtaataattgcaagtattgcgattattgcagggtttaataatcgagcagaagcatttagtttgttcaatgctggtgtagtttttgtggcttttggcattgtcttacttttaggcgcaattccggtttatcgcaattttgatacttcatcagtattgatgtttgtagctggcatattgattgtgttaggcataatcatgttaatcgttagtgtaattgctagatcgactagaaaaatcaatctacaagatttggcaattgcattaatggtagctgcagtgtgcttagtatatttcattcataatgcaagcttgaactttgctaacttattagtgcctgaattagctttaattgtagggttaatcttgcttgtttatccaaaacaaaagtaaataaagttcttcatctggtttagggactaattatgaaatacagaatgcaataattcatgctatagatgaatgcgttggatcatataaaggtcttttatttgatgcttttcatggacaaattaattattctgagctaaatagttcaaaggttatgaaccatattaaggagacaaagtcgaacacaatttatccggactgtactttaaatatgcaactaaaagaattaatgaaaagaacagagacttatctaacaataattaattctaaagatggatatactgttaaagcttttagtacaaaattgcaaccagaaactttggtaaattctactccgttaacctctagattattattacgtactaataaaccattgattaggggatgcatgccattctggtaaagagaaaagaggcctagtatatgagaagattaaaaacagcagtattaagcgatttcttaaatgatttaccattgggtgcattcattacatatgcatattggtatgcttatcaacaaactcataatcaagggatagtctcaatgctgggaactattgccatggttgcactgctacttgcaatttttggtggctacatttcagataagcatagtaagatcaaactaatgcgctttttaattttgatgagattcatcttcattgctttaggaacacttttcttggtatttaaacctgaaatgagtgttgcagtagtttgttttgtagtaattgctagttcagtaattaatattatttataatcctttaactgaagcatttgctcctgcattgatagacgatgataaagaattaatcaaagcaaattcttgggtttcattagcaaataatattgcgacaattgtctcatcgggtgtcgctacaatttttgtgacaataaatcaaccattgatttcgctgattattcttttagtgtcagtaatgatatcttatattctcttaggatttataaaaccggattcagctccagctcatgctggtaaaatcaaagttaaggaaatacttgataattttatagatgggataaaattagtagggcataataagctgattatgttgatgattccaattgcgcttatagttaacttctgtttctatgtgatttggttgttgatgccgaagtttgcaattacggtctttaatcaatattggtttgtttacaatggaattgatattgcttatacagttggcggaattatcggtgctttgattttttctaaaattagagacaatatcgattctgctattgtttgtccagcctgtctttccttacaagccgtttgcttagcagtcgtcggtattagctcattactaacacgttcattagtttctgcgattatttgtattgtatgttggctagcatatgggatctttaatagtattttttcaatagtgtatttctctgttgtgcaaatgtcgtcttctaaggacaatacaggattaatgatcggtgcagttatgactattttttctattattaacccaattgcgacagctatgagtgatcctttaggaaatatggttaaattgccacttttgatatttatcttgggattaataatggtcttagtgtcagtattgacttttatgccaatttatcaaagaatttttaagaaatatgacaaattatattcaaagtgaagttgtagacttacttaatctagataagaaaaaattatcaaagtatgataaattatggggccaactttgttcacaaaatcaagataataatgaattacttagtatcattgaaagaactagtccgattttaaatttaaacaatgaatttgacttacatttaccatattcggctactaatttaaaaagctgcaggaaatttagcaataaaaaaattaatatttctgactttacgtggctattaagtaattcttttttaagcaatgaaggtggacatagaatatatggatcggctggtgcattatatcctgttgagcctctcataatttgtataaaagacaacatggtagtgggattgcctcaaggagtatacggcatagattacttgaataaagctttgaagaaggtaaatactaaagtagattttaaaaagttgagtcatagtatttcaccatatactggtcaattgatcagttcaatatttatttgctatatattttctatgactagaactgttgttaagtataattatcgtggtcttagacacatgcttattgaggttggttcgatggctcaagcttttagattaaatgggctagcaagaataaataattttggcgatgtctcatggtcaggttttgatgataaagcattaaaagacagtttgggcttgagaatcatgaaaccagtattgttgcaattttttggaattcaggactataaataatttcttcactaaaaaagacatctcttcaatagaggtgcctttttgtatataatggtggtgtatacgatttttattcagaagaggtaaataatgaacaaggaagaacttcatcaattattgcacccaatgaaagttattggcttaggtggtaaccctgcattaaatgaaaaaattgcggcaattttacaccaaccattgatcgaaactgcggttcaccactttagcgatggtgaaatccaagttaacattggtgaatctgtcagaggttgtgatgttttcgtaattcaatctatccaagatccagttaacgaaaactttatggaacttgaaattgttttggacgcacttcaacgtgcatcagctcatgtaattaacgtggttgtaccatacttggcatattcacgttcagataccaagactcgttcacgtgaaccaattaccgctaagttagtggctaacttgcttcaattgactggcatggatcgtttaattactgttgatctacatgcctcacaaattcaaggtttctacaatatccctgttgatcacttacatgctattccacttcttggtcaatacttcttagataacggaattgctaccaaggaagatgatgatatcgttgtagtctcacctgatcactcaggcgctaagcttgctcgtaactttggtcaatacttcaatgcaccgattgcaattgttgatcaaagaggtgctcgctatgatactgaggttcacgacatgattggtgatgttaaggacaaaaagtgtatcatcattgatgatttgattgatacaggttcacgtatttcttcatcaactaagtcagttttggcagctggtgctaagaaagtttacgttgccgcaacccacgcacttctttctaagaatgctactgaagtacttaatgaattaccaattgagcaaatcgtagttactgataccattaagcacaagcgctacccagacagaatggtcagaatttccgtagaccaattgcttgctcgtggtatcgattatgtatacaatgatcgttcaatccaccaaatctttgacgaacaaaaccgtttaaagtaaaattcttattgataatttgaataaaaaatgatcctcactatgaggattattttttattcaaaaaatcgggtagataagtcataaaactatgtctaaatagtaatgattgatataattgatgtgtgttgtatagaaagagaaagagaaagttagaggaatagactatggcacgacggaaaaacatgaagagacggagagttattctaggtaatactttccatctgatcagagaaaatggaatggataatgtttctttgcaaatgattgcagaaaaatcaggcatttcaaaatccttactgcagtcatactatcctcataaggctaagttaactaacgacattatccgcaatctttttaatactttaggtcaacaagttaataattatgacatggctaatagcaatcttccttatgctagaactaaggcatttatttatacgattgctatcttggggatgcacgatgagggcttggaccgtattatttctgaagcttttgttagcaatgctaccctagataattggggaatcatgcttaatgaatggattaaggaaaatcatttatttgatgacattaacgttgacgaaagcgaacttgagacaggaattgcgtttgtaactagtggtattggccgtctatatcatgatcgcaaaaagcaccatttaacggccgaagctcttgctaactatgcaacgagtgcattgatgttcagtttcttgcattgttcttctgaagaaattgatcaagccttaaaagaaggacatgaaattattgaaactgctgatatggaagttgttcaccgagcaattgatacaatgttcgatgaaggcaaggaaattttcagctaaaggggagtcgccatggttgaaggcaaaagagctgatttgcgacgaatgggttatgagcaaaataaccaatataaacgtttgttggctttcgtcatctttttgattgctgcattgtcattgattacagctacttttttaaatccaatctttatgaaaaaacagattaggactagctataatagggcagtagttgttcgccaagtgaataaaaattatgatagcctagctgatttgattaatgcagatagtgaagataattcaaacttactatcggatacgcaaactcaaccaattgccgaccatattattgattattctttgggcattcattggtttaaggttactagtttgccactggctaatcagattttaagcgatatcgatcaaggaattgctaaaggctcatcaagtggggcacaggaagttaaccgtaaactgaaaaagcagggaactaatgcaccttacgcgattattaaagccttcaatttaagtgtgatcactttaggagcaaatattgctggtttattgtttatcgttaatttgataataattattgttaccattattacaatggtttcgctactcaacgatatgaagtcgcgggctacaattcgaatggtgattcatgatacgatggctgctggcatgtgggcaggtttttggctaattttgatttcaggcttgttagcacttgtgccagtaatctttaatgtcgataatatcgaatttggctttttgcttgagattggcagtagcgtctttttggaatatgtaattgctggggtaattatttacatcatttgtgcgataccatggcaaattatagctgctaaataagaatgagaaaacgtaatctgtagaatgattacgttttttgtttgcacaaagaatcatctttctttataattaaaaaataattaacaaatttcatatgtttatattttaaaagaattgggcgagtttatgaaaaaagctaaaattataaagacttttcttgctttcattactatgctttcgactctttttttgtttaatcagcctgttaatgcagccaataaggaggttgagactggctcagtgatgaaaaaaattaagcagtcgaaagaattagtagtgggcacctcagcggattatccgccactggagtttactaccagtgaaaatggcaataccaaatatgtgggagttgatatcgagttggcaaaagatattgccaaggatttacatgcaaagctagttattaaaaacatgagctttgattcacttttggtagcgctagagacaggcaaggtagacatggttatttcggctatgacacctaatcccgagagaaagaagagcgttgatttttctaagatttattacaagccaagtggcgaatatttcttaattaacaaacgcgatcaggccaaatacaaaaaaattaaagattttgctggtaaaactgtcggtgcgcaaactggtagtattcagtattctttgattcaaaagcaaatgaaacagtctaaggttaaaggcttaggcaaaatcaacaacttagttctggcattaaaatctaataagatctctggcattgtcatggaagaaatgactgctaaggcctaccaacaaaacgacaatagcttgatggctgtgagaagtgacttgcgtgaacaacaagctggtaacgcagtagcaattgctaaaggacaaaatgacttagtagctgctgtgaacaagactattaatcgcgttgaacaaaaagatttgattacgcgtggtgctagttaaatcgttctagacaataagccaaattataagctaaaattgcaatttccaaccggctttgaaagcctatcagactacgtgctcgattgttctcggcattgtaataggtcagaagcgaaaagtcgctttcaattgttctgcgaatagccatcaattgatgatcattgtgctttttagctcctgtcatatttttacgatatggtgtccaaagttcgtaacccatttgttttagctgttgatgcagttctttgcctaaatagccttcgtcgccaagaagatagtaattagatggatgggtattttctatcagttcaactgtctccctggcatcatgaactgatgcctttgttacgacataatcaagaatgtaaccgtcatcgctaacaatggcatgaactttgaaaccatagaagtaaattttcttggtggccttataaccaatgttggcataaccgcgaaaaattttagcacgatagtttcgaattggttggcaaacaggtaccggaaagctgtcaatgatcaagaactgtccattcaggtcaacctttttattcatttcttgccgtatctgataaatcaattgcaatagctgacgtgaacgccgattaaaacgtgagtgtgataaacaattgaaacattcacagaatcttctttgtgattcaattcctgtcttagcttgccagataagtaaagccaaaatcagactgtccgtagttttaatttgatcaatatttcgccgatgagtaaactcagccggtgcatacaaacgataccagtgccgacaaattatcactaaatctttaaaactaacttgtaaatggtggctaaaacgcttaagcttaaggcagttcaatcagatcagactcttttctattattactatttacaagtcgagtctaacaagattggacttttttattaactaaaacgatttaactagcaccacgcgtatttgattaataagaaatacttgcctgaagcagctaagtatatgaagacagcgcagaagacgaacacgatgactaaatatattccttactttattaagggagttggctataccatcgtgatcacgattttctcagtgttaatcgggatcatcttagggatgctcttagccttaatgcgtttgtccaagaataaattgctgcactggattgcagtttgctatatcgaattcattcgtggtacgccacaaatggtgcaaattttatttgtttactttggtgttggagcattaatttctaacctgtcagctgttgtagcggggattatcgcaattgggttgaactctggtgcttacgttgcagaagacattcgttctggtattgcttcagtagctaaaggacagactgaggcggctagatcattaggtctttctcaagctaaggcttaccgctatgtaattattcctcaagctttgaaaaatatttggccggcactaggaaacgaatttattaccctgctgaaggacagttcattggtttcagttattggggtaactgaattaatgtaccaaacggaattgattcagacttcgacttaccgtggtgttttacctttattcattgccatgattatttactttatcatgacatttactttaactagattgcttaattatttcgaaagacggatgaaacacaatgactaaaatgatcgatatccaacatttgaagaaaactttcggcaaaaatgaggttctgaaagatatttctgcggaagtagataagggccaggttatctgtattatcgggccatctgggtcaggtagagtactttcttgcgttgcctgaatgtattagagcgtcctacgactggtaaaattgtttttgatggaacagacttggctagtctaaaggatggtaaggaacttgatcaattgcgggaaaagatgggaatggtttttcagaactttaacctttttcctaatatgaatgtaattgaaaatattaagttggcaccgatgaaagtcaagggtgttagtgaagctcaagctgagaagactggactagccttacttgaaaaggtgggcttggccgatcgtgcaaaacaatttccagctagtttatcaggtggtcaacagcagcgggtggcgatcgctagagccctagcaatggatccggaagtaatgctatttgatgagcctacaagtgctcttgatcctgaaatggttggcgaagttttgaaaacaatgcaagatttagctaattcgggaatgacaatggtgattgtaactcacgaaatgggatttgctagagaagtagccgatgaggtctggtttatggctgatggctatttacaagaaaaaggcacgccacaggaagtgtttgaacaccctactagtgaacgtgcaaaagatttcttatctaaagttttataatcaaaaaggctcaagcattgcttgggccttttaatttactcatctgtaatgatggggtttgataatacgtactgtcttacgaaaaaattttgatgccatcctttttgaattaatgcattaaaaaaggtgttttgattattaggcaaagcagtggctttgggaatgatgacagcacgtaaaatcttgttttgaagtaaaattggtgattgcacatctgtttcgctatttaaattagtggttgcttgattggtcggcgtgttggttgtatcctgctgaacttgataatttgtagtgtcattagtactatcttgcttaaatagcttgaatctgtacttctgcacgcctttaacgtcaacttcatattcatgtcctgcaactaggttagtatttgcgggtgaataagttaggatcgttctaaaattgccgtagccacaggagctgtaattcttaacatgagctgcagtagtaacaactttagtatctaaatcagtgatagtaattgttggcttatttttaatggttctatctgataaatagagcgaccacatgatatttttcccttgaagcaattcaatagggaaaagacgcatgctaggataagcaactaccggctgactagcaggacgaaaagtatcattaatgtttagtactttttgaacggaatagcggtagccatttgtaccataagctgccccaatgcctgtagtggttaaacgacttgaaagtagccaagctcggtgaccggtatctgaaccagttaaattataatggtcagtaattaagtcagtgatcacatccccagcggtttgctgtgaaacattaaagtttaaatttgaagtttcagaagtgtctttagctagcttccaaacaaatttggagatattgcttggcttagtttcactaggtaaaccatgttggttaatgaatgggttagcattaattgcggccattacagcagccgtaatctgcgcgtttttattaagtgtatcagtagtcgagatagcgggcagactgaacaatgatcgatagtaattgatataatctgtttgcgttttaatgtattttggatctaagcgacctaccttaaattttttgcttagatttggctttttagcataaatatttgcggcactataactagttttatcaaggttcgcatattccttttgaaaattatgaacttcgttaacttcttgtgttgtgaatgtcgctgcttgtgtaacttgtccggcgagggggataaataaagttgcggcagcggcaatagaaaatttccgtagaagcattttagactcccttctatggttgtcagtatacctttcattataaactataaccaatgaaaaggctttagtgaaaaatattccactattttgcgcttttctggtattctttgcgtataattaaagattggaacatttaaaagaggtataaaataatgactaaaaaattacaagttggtttgatttttggtggtaattcatcagaatatgaagtatcaattgtttcaggccgcaacatctataaggcaatcgacaaagataagtttgatgtgcacccaatttggatcactaatgaaggctactttgctaatgaagaagaaagcttcaaggttttagatgatccttcataccaagttaagaacccacataaagttaacaacatttctaacttaattgaattagaaaacttgccagaaattgatgttttcttcccaattgttcacggtaacttaggcgaagacggtgttttacaaggtttgttccgcttgatggataagccattcgtcggtgatgacgtcttaggagccgctgtaacaatggataaggaattcactaagatcttggctcaaagagttggtgttccagtcgctgattggatttcaattaagcgttttgaatacgacgacaagaagaatgctaaacttaactatgaaaaggtagcagaaaaattgggccgcgacatgttcgttaagccatctaaccaaggctcatcagttggggttagtcacgtaactaatgctgacgaatatactgcagccttaaaagaagccttcaagtatgacgataaggtcttagttgaagaaactgttcctggcaccgaggttgaaacagctgtcttaggtaacgacaagccaattgtagcaggtgttggtcaaatcaccaatgcaaaaggttcattctacacttatgaaaataagtatgatgataattcaacttctaagttacaaatcccagcagatttaccacaagaaattatcgatactgttagagaaaatgcacgtaaagtttatgcagcaactgaatgtagcggcatggctagaattgactccatgctcaccccaggtggcaaggtagtcttgactgaagttaacgctttaccaggctttactaatatcagtatgtatcctaagttgtttgaagaagcaggtgttccttacagcgaattgattacacgcttaatcgaagcaggtatggaccgttttgatcataagaaaactttgcttcacaagcatgactaaacgccaaaaatatagaggtagatttcaatgacgactaacaagcatgattttgaagaattggctgcaccaaaagcagctgcacaagaattaggaattagtgttgccacgttaagaaagtattctttaatcgtggagaaggtgaccggcaagatcgactattttgctcggactaagcaaaaggctcgtctgtatcatcaaaaagatattgatgacttaaaggcttttcaccgtttatctaaaaatagtggcttaactttgcaagaagccgctcgtcaaatctatgctgttagtgaaaagaaacctgaacctgaaactaaagaaccagctcctaagcccgcttataacagtaccgatgtaatggatactgagcaggtggttaagttgcttaacactttgcaaaagacaatttctaatcaaaatgaggcaattaattctttgcagaagcaattgaatgtcattcaaaagcaaaatcaagatttaattgaagcacaaaagcaattagctgcgccacaagatgatttagataagtttgcggctttgccagatatttctggaattgtgagtgcggatgaacctaaaccgaagagtgaagaagaaaagcgcgctgaagttaaaaaagacatgaataagagtcaagaacaaatgcatgacgagattatgtctaaggcaaaggaaaatgccaagaagcgggctacttcaaatgttcaccgtacactagaagatatgcaattaacggaccaaaaggaacactggtggcaaaaaatctttaagttttaaacaaattgattaagaatcaagagctgacctaacaaaaggccagcttttgttttacagtaggcgtataacaattaataggaagtagaagtaatgaaatttaaatggaaaaagcgctatacgatagcagttatcgtggcaattgtgggagcattattgacggttttgtcctattttgccactgatatttaccacaaggacgacgttgccgtgattaccgatagcaagatcaaggatactttgattgaaaaaagtgaagatgtgtataaaaatgcggatgaaactcgccagcaaattttgcacttaaaagttttatcgggtaagcacaagggcgaaacttacacgactaaaaacgtgtattatccttcgcaattgacgacgcaaaagtatcgtgcaggtcagagaatttttgtcaatatcaagaagggtgatccagcgatcgttaatcctaagcgtgattgggtgttagttttggtagtgacaatcactttagcattgatggtggctgcagtagggaagcactcactctcgctggttgtgtcaatggtaatttcgtggctgatcttttatttgattatcatttgggatgtgcatttgaatggcgcccacattattttgctgtttggcttagctgatatcgtcttttcattctttagcttgctcattgtgcagggcttgaataaaaaaatgttggcgacttggttggcaacgctgctaggagtatttgtttcttttgccttgtgctacgtgatcatgaagttaacgggtgaatcggaaatgaaatatgagaccggtgactatgcaacgcaagatccacgaggcttgtttttagctcagactttgattggaattctaggtgcagtaatggatgaggcgaccgatattatttctagtttgtatgaattaattcaaactaaaaagaatattacgatgagacagttgattcatagtggtcgaacgatggggcaagaaattatgggaccgttgattaatgtcttggtcttaatttttattgccggtgcgctgccagaaactattttgtacttgcgtgataataatactttagcttcaacttttggctttactctgtcgctgggggcaacgcaaagtgtgatttcggcaatcggaattgttctgacggttatttttgcgacaggatgcagtttgttcttcttgaaaaaacgcgattggaagagtttgtttaaaaaagaaggtgagaataaatgagtacattatttgcattgatcgttgtcttagcgattttaatgacaattgtcggtggtgaaactggaattcgtagtttttttagtgtgctaattaatacgattctattgatcttagtggcgatgctaatatcatggggaattaacattgcaattttgacgctgatttttattcctttaaagctagttacgattatctttttaggcactcatgactatacggtagcaaagaattcattttattcttccttcttagtgtgtttgattattagcctctttattttgggttgtcaatacctggctcaagctgcaggactaggaccagaggcaggagagttattggttggcttgtcgcagatgccgggcttgagttatccgatgattgccgtgacagtggcgattttctcaactttgggtgcaatcgccgaagccgcggtagcaatgagttcgggcttgctagaaatcaagaagcataaccctgctatcggtgaagaagagttgatggcttctggtacggctattggtaatgatgttttgggtacagcaatgaacacgattttatttgggatgttcggtagttttttgtcattattcttatggtatttccgcttgcattacacgattggtgaagttttaaatgaaaaactttttgtaaatgaagcgttaattatcatgtattctttgattggggttatattaacagtgccactatcatcatttatgctatcaagaggaatgagcaagaaaggaccaaaacatgagagtagaaaatctgacgctgactaactttaataatcgtgaatatcaagttcatacatatgtgctagagcctaatcctgaattggttgagcaaaagcgcccgctagctattgtagtaccaggtggcagctttaatcacttatcaaaaagagaaggtgaacccgtagccttagcatttaacaatcaaggcttcaacagtgtggtgatggaatataatttagtacaagatccaggtaaaatttaccctgatgcggggttagatgttctaagtactgtgaaatatttcagagaccacgctgatgagtatcaattggataaagataagattttaacagttggcttttctgctggtggtcatgtggtcagtgtagctaataacatggctttaaataaaaattatcagacaaagtatgattttgataagactgatgttttacctaataagacaatcttaggctatccgctgattgatattaaaaagattggttttccgattccagaagatcaaaaagcaaaaatgcctgtagaggaagatattttggatagtgcattaggtgttacacgtgaaacgcccgatacatttattttccaggcatgggatgatccggtggttttgatcgaaaattcgattgaatatattggtgctttgaataagaataaggtttcagcagaagctcatttgtttaaccacggttaccacggcttttcattggctcgtcacaatgtggaaactaagggtcaagattggcaggataatccgcacgcggcgcactggtttaacttggcaatggaatggctaaagagtgagtggggcgaatgatgtgaagcataaaaaatcttctaaccctaatgacaatatctatcacactatcgtcaagaatagaaaaattgaccgaatgattatgccttttgaagcggtgtactgcgtgtggctaatcattacgctggttcttaactttaagctatttgcatactcgattgacgcacaattcgtgctaatttctctatttttcattagcggatgggtttcgtcattagttaagaatcattgcatgaagaaaagtagaaaataagataagtaaaaagagttctcgcacgagaactcttttttattagaatcatttactttttatctctaaagaaaataacttccttagcagccacaaatgggccagatgacttataaacctttaatctaatagccttggtatcgacatttcttaagccaacaaccttattcttgctatcagacttccaagtcaagtgatcgccgtatggcttaaagttaacgccatcgcttgaaagctcgacactaacttcaacaggatcgccttggtgatcaatctttctaggtacccagaccattcgactcaagtgttccaaatgattaaaggcgaagtttaattcaagtggcttgtcttcgctgaccccatcaatggtttcccattcacttgctaacttcaaatcagtcaagtaatcaattggatgatccttaggactagctagactgctcgtgacatgaatgtcattaattgcgtagttcattggatcgggcttggtaattgcgccaaacggatctgaccattctgaaaccttattactagctacataacgcaagcgtagggtgtagcgggtatttggcactagttcatggaaagtgaacgaattgccatcaatgccgtcgtgcaagatgccgttaacttcaatttgaacttgatcggttaattgcggccagactaccgtcaacgaatgagagctggtcttgtctggatctaccattggttgttttggtgagcgtaatagtgaatccgtaatggcgtgaaccaaagtttcattgccatatctgaagtttctaattgtaatttcaatcttagaatcggtaatgtcgcgtttagccagcttaatttgtaaagcagtttgtttcttttcttggtattgatcaaactcaggcatccagctgtaatttgtgttaaagaagaagccttccttagcatgggcaaatgtatcaacggtaccgtactcctgcattgggatttccttgtcgttgattttaacagtcaaaccatcaggataaccgtcacacatgatgttcaagttggtggtgttttccgtttggaaagtattgaaatcgccttgagttgggtcgatggtgatcgtcaatttgcttgcttctaaatcactcgtgatttgtgtagctacatggtttcttgaatagtcgttatagccgttatcatcgtaagtaaccattttactcttgccttgagggtagaggacataattgcgttcgccgaggtcaaaaatagcgccgcctcgtacaaatactggtaaatgccaggatgggtaagactgcttattataaacgcgtccgcccaagtactttttgccatcaaataagtcaacccacattgttctgtggttaggcaagtaaaggttgtcttttcttgaattgccattaccatcttcgcgaccgttaacaattggcgaaatcaacaagttaggccctaacataaattcatggcctacctgtggggtgtagttgacttgttcatgtggaaattccaagaacaatggccgcaagattggctcaccgacttgagcgcggtagattagggtatataagtaagtctgcaattgctcacgtagttttaaataggctcgattaatttgcgtcatcttactattgtaagcaaatggggtcttactaaatttaccttgatcgtctaagttgaacaggattggggtaaatgccttccattcaaaatcacgaatggcaatttgagcattaccaccgccagcgttaccgtcaacggcgctgccaactaaaggctgaccagaaaggctagctcccaaaaagccagctacttgcgttggaatgttttcccagttgccgccaatgtcaccaaaggctagcattgttctattttgactaccagcaataccagtattagagaaaatcaacggccgcttacgcttcaaattgttgcgtaaaattagcgcatcatttttcaatacttttggatcggttgtgtccgtttgaataaaggtggtatcaggtgaagccttcggtgtgttgttttgactccaaagaccagcgctaacgtcatgtatagcggcgtattcactgaagctagccatggcttcttcgttgatttcttgcacatcatagttaggcacgatccaacttaatttaaaatgctgcttctggtagcgatcaaccattgcccgtgctgagaattgatattcttcttcgccgttcaaggaacctttgccactagcatcttctggcttgttagttctggtgtaataattaccgtcttcaaacatgacagcattacgttccttagcttcaccaggttgccataaggtagttaaaaagttgccaacatgacctaatcctagtgcatatttaggtggcatcagcggcttacccgttaacatgtaatactttgccaaaatatttttgggtgaattacctaatagataaaaggtatcaaacatgttggtgtcgtgcttcaagatagtggcatccggattgcttttaccaaagtcataattgccagcactctcagtattgcgcaattcaccaaagccggagttagcccagaagaatggcactcgggtcaaaacgccgcctttaccggtaatcttgtcgcgcttgattgaaatgatttcacctttatgactgaagtagccgttctgcatcccgccaccaaagtaaaattcattcttgtgttgcttcaaaatttcggtagtttgatcattgcctaattcaagtggactcagctgaaccaaacgattgcggtgcagcatctcgtcaaagatgctcattacggctggcttttgttggaaaataagttgataattgccagacttaatgattaaggaatcgctggttgccttaggctgtgatttttcaaaatagtcattgttgaattgagacaggtcaacaaaagatgagtgattctcgtcaaacttcttagctggatcgagaaaatatctgaagatcccgtcagctaaaatataaagacgagcaatatcgccggtggagtagtgaagttcataataatgatcacgtttgttggcaccgataagttggcctagttgatgtctttctatttggttttgtgtcatatttattcttcctatttaaacttgctaccttatattataactaaaaatcaaaaaacttcttaagcaattgtactaaaactggtatttaccaattttgttagatataattaaattaacaattacgatttagacatataaagaaagaagatatttatgacttattacattcatgcagataaatttttcttagaaaacagaacagaaaacggcggctatcttgaagttcaagataatggcaagtttggctttttctatccagaaagcaaaaagccaaaaggtaagattgtcgattatgctggcaaatgggttgcaccaggattagttgacacccacattcacggctcattgcgagaagatgtaatgaagagtgactgggaaggcatcaataagatctctaagggcttgcttagtgcgggggttacttcatggatgccaacaacgatcactgccgcaagcgataccttaactagaatctgtaagatgtttgcggaccatcaaggacaagaagaaggggcaaagattcaagggattcactttgaaggaccattcttcacggaagaacatgctggagctgaaaatcctaagtacatgatggatcccgatattaatgaatttaacaagtggctggacgcttctaacgggatgctgaagaagatttcaatggctcctgaaagaaaaggttccaaagaatttattcgtgaagccgttagggaaggcatagtagttgttttgggccactcaagcgctagttttgaagaagcagtcgcaagcgttgaagcaggtgcaaccatgtttactcatacctttaacgggatgcctgatccaagccaccacacgccatcaatttctaatgcggcaatggcacttaataatgtgaccgatgaattaatctgtgatggccaccatgtgcaaccatgtatggctaagactttgattaatgccgttggtccagaacacattgccttgatcactgattgtatggaagctggcatgatgccagatggcgactacatgttgggtgaattgccagtctatgtaaaagatggcatggctcgtcttaaggacggcgacaatttggctggatctatcttgcaattgaagcaagcagttaagaatgtagttgactggaacatcgttactccagaaaaggcagtgatgatggccagctatgttcctgctaagagtgctcatatcttggacaattgcggtacaatcgcaccggataaggatgccgacttcttgattttgaacccagatttaaccttgagtgagacttacctaaatggtgaattacgttataaggcttaatttgttagtctagttttaaatagtcctcattagattgagggctattttttgaccctaaattttggcaaatagtatacaattaataatagtaaagtaggtattatacatacgaggaggaatttactgtgccagatggaatcagtcaattactagtactttttatgtaataactttcaattaattgaataatttgtactcttattgattaaagaaaagtatcacatatgtttcatgaatctcgtctagccaagtaggtgagattttttattatgtttctatgtaatcgctttcaatttagaaagaaatatgctatattatgagtgtaaagaaattaagaaataaaaaatatttaaataagtttaggtaaaaggagacaggtgagttccgatgggcacttgagagtagaaagtcagatattatagaaaggtttgtgataccaatgggcatcgtaaattgaaaacaaaatgtagttcaataatcatcaagtgatattaatgtacataagaggccgtgaaattattagtaggcatagaataataactatttgatgaatcacttggattaggattaagaaagactttcatacatgataaatattaataagaaatgacctttcgctggaatgaagtatgcgaagggtcatttaattttggcttgaaaacgtttggtatttagcattattgttatttgttaaatataatatgaagtacatgtactaggccgatagagaggaaagttatgacaacagactcaattaattttaaaatcgatgcagaaagtaaaaaggtgatgattaaagaattagcaattattaatggcttaattcctgatgatgataatacagtagataatctaaatgattattttaaaaacttaggaatttaatggtttattggtcttttatctgatgtagtaaatcatgatttagtaagtcgtaatttagtaaaatataatttagaagatggtgatcttatgtttattggacgaaagaaagaacttactaaattagagcaatttaattagcgtggctaaaagatattactacttgttttcaaagtcaggctttacggattcatgtacggaactggcagaacaagtggggtgcaagttgattagttttgatgaaatgtaatatcatttttcctattatttttatctgttgtgatcggagtaagtactggtgtttaaaaaaggcgataatgtggtgttaattctaaagcctaatggcaatcttgaaatgaaaaaagaaaaaactaatttttgggacgaagtatcaaaaatgtctgctaaagaaaaaagattgcagattgaagatttgggatatgatccattagaacaaagatcaaaaggtagagaaagaattgaggattaaaagttagaaaaggttcttggaatcttttttgatgaatttaggtaatctgaaaaaagaaacggcaccgctagataattagcgatgtcgttttagttatgcttagctatattagtatgtctgcttaatttatttaataaactgcgccgtcgtagaagttgtaacgagggcggttgaagtcgaagtcttttaattcactgatcttaattgcgttatcgcaaacaccccagctcattaagttgattggcttaccgtaatcttcatcaggaattaccaacaagatgtacttgccttttgaaagggcatagccaagttccattcccagaccaacatcttcttcttcaggcaagtaaacgccaagcatgatgtcgctggacttaatccctactaagtcgttatggtaggtagctgatgcccattcaatgtcgtgcaagtattcagggtgttcatcaacgcggatacccttatattgattatcaagaggtacgtagctgttttctaagtcaacggtaggattttgctttagagcttccattgcttctttgtaagccttattttgcttttcgttgaaccaaccggcaccaaagtataaagtttttgtctttgccatatttttctccctttaaaaatgatttaccttaactttaccatcttttgggttgaaaaaaacgtcttgttaacttatggtgaaaatgttaattccacattaggaaggaaaaatccaatgactaatcaaaatctttttgcacctgatgcagtatttatttctaatcaaactaagcaagatttggtttttaaagaagtttacgagcatttacgcgaaagtggctatgttaagggaaactttttaaaccatattgtcgaaagagagcataattttccaacgggattggatactgcaacactaggtaaaaatattcctaatattgcgattccgcacaccgagggcgagtttgttaacacgagactgattgttccggttgcgctgaaaacgccagtcacttttcataatatgattaatcctagccaagcaattgaagttaaatttttattcatgcttttagataatgacccagatgggcaagctgcattattagctcaagtaatggattttttggctaatacgccagccaacgaattgcgcgaagtttttaattttactgatcctagcgcgatttatgcctttttagagcaaaaatttggtaagaaaaaagaagactagtttttagcctttttttttctaatcttcaagataaatattacgcaacttcatgatgtctgcacttgagagcttcattacatcgcgtaggtagttattaataccgccatattcatcgtttagtactttaacagcatggtcaaggtattcactgcggacactctgaatgtcacgaatcgattgcagcacattttcatttttaccattttgacgggcatgttcaaccatactgtcgacgaaatccttggtagtgatgttggttaaaagatagtctttcttaatcgtatttagtggtacgccaagagcagataatgcaagtaatgcaccgaagccggttctatccttgcctgcagtacagtggaaaataacactttcgccatccaccgtattttcaagcaagacatcgaagaacttgcgatatgccttttgtgcaggttcactttcgatcatgtcttcgtaagcataatgcatgtgattgaagccaaaatcagcgtcgtcgtgtgcttgtgtatctaagtcagtgatactcttggatgaattggttaagtcctcactgaagacgggatcatagatatattcaacaccatctggcacgcgatcgggttgattatcaacttcttctttacttctgaagtccacgtcatatttaacgccgtaatcagttaaaaactgcttatcaaatggtgaaagatcagctaagttaccggttctgagcaacttgtgcatcttgatttttttaccgaataaagtttcataacctccaagttcacggaagttgcgtccactagttactccgattaattgattagttaattttttagtcaaaaaaattctcccctttctgttaatgaatgtcatgaatattattttagcaacaaatcttcaagcaaacaatcaattaaaaagtaacggctttcaaaattatgctaaaataaagggtaagtactagtgcaatttataggagatgaattaacgtgacagataaaacaaaagaaagcattttagttccagttgatggctcagaatcagctgaaagagcctttgacaaggctgtaaaagttggtttgcgtgatggtgctcatgttgatgtattgaacgtaatcgatacgcgtcaatttatgggtgaaatgcaagacactttgatttcaggagataccatttaccaaatgactcaagattctgaagaatacttgaagagtttgaagaaatgggctcacgataacttcggttttgacgatgttgattatcacattcgttatggcagtcctaagcgcattatttcttacgacttcattaaggaccaccacaatactttaattgtgatgggtgctactggtttgaatgcagttgaaagaatgttgatgggttcagttactgaatacgtaaaccaacatgctttagctgatgttttgattgttaaaaccgatatgggaaacaatcctcttaagccaactatgaaaaagaactaatataagaataatcgccaaatgattctaaattcattggcgattatttttttgaaaaaagttgcaaaataccttgatagaacacgaatgtttctggtattattttatcaaatgaacgtgggaacgaaaaaggggagtgaaagataatgtttatgcaatcagaacaatttattgcaaaggatgtgtctttcgctcgtaaagacgttttttctgttcgtttagttattagaaacgtcattaattaggcttaattattgatcgcctttggcgacccgtaattaagtctttttttgtgatgtagagtagtttgttttatcactgtgtatttatgtttatggaggacataatgaaaagatttagaagaatcttggtagcagtagttgcacttcttgtagcagtagttgcaactgcgtgttcaaacaagagtaatagttctaagggtgataccccaaagtcattaactattcaatttgtaccaagtcaagctgcaactaagttgcaagctcgtgcaaagcctcttgaaaagatgctttcaaagagattgggtatcccagttcacgtttctatgtcaactgactacaacaccgttgtggaagctatgaaatcaaagaaagttgatgtaggttttcttccaccagatggttatgttttagctcacaagcaaggcgcagccgatttgcttttgcaagctgaacgttacggtgttaagcaaccaggtggtaaagcaactaaccaattagtaaagagctatcgtgcagaaatccttgttaagaagggttcaaagatcaagaactggaaagacttaaagggtaagtcaatttcagtacaaaacccaacttcatctgctggatacgtattcccagttgctgaacttaagcaaaagggtttggacgtaactaagagttgtaagttagttactgttactggtcacgaccaagctgttttgaacgtattaaacggcgatactgatgcagccttcgtctttgaagatgcacgtaacatcgttaagaaggacaacccaaagatcatgagtcaagttgttccaatttactttactaagccaattcctaacgacactatctcagtaattccaagtatgtctaagtcattccgtaagaagcttgctaaggcattcatctctgtagctaagtcaaaggaaggtaagaaagttatcgaaagcgtatatagccacgaaggttacgcatacgcaaaagatagtgacttcaacgttatccgtaaatacgacaagatcgttgaatcaactaagaaataataaatttaattaagggagtttgacgattaaatggcagataagccaatgattcaattaaaagatgtttccaagatctacgacaatggtactgtaggtttaaagggcatcaacttaactattaataaaggtgaattcgtagtagttgttggtttgtctggtgctggtaagtcaactttgctacgttcaatcaatcatttgcatgatattacttcaggcgatattttgattgacggcaaatcaattacaagtgctaaaggcaagaatttgcgtaaattacgtcgcgatatcggaatgattttccagaactttaacttggttaagcgttctagtgttttgcgcaatgttttggtaggccgcgtagcttactacccaacttggaagactacttttaacttattcagtaaagaagataaacaaaaggcttatgaagctttacaacaagttgatttggccgataaagtttatgcacgtgctgacgagttatcaggtggtcaacaacaacgtgtagctattgcacgtgtgcttatgcaaaatccaaagatcatcttggctgatgaaccaactgcatcacttgatccacagacttcagtgagagtcatgaatgacttgaagatgcttaatgaaaaatacggcatgaccgtagttgctaacttgcacagtatcgaacttgcacaacaatttggtgaaagagtaatcggtatccgtgctggtcaagtagtttacgatggcaagatgaaagatactcctaagtctgtcttcactaatatttacaatggtggtaacggcagcgaggaggatgaataatgcctgaacaagtaaatcaattgcctaagcgtaagttcaaagtaatgaacttggtttggacaatcatcatgattgcaggactatttatttcaatcaatgttactaacacgcacattagtgtcttgtttgaaaactggaaccaatttgctgacatctttattcaaatgtctcatccagattggagctacttgaacgttgtttggcctaagttgattgaaaccatcaagatggctgtcttgggtacggtaattggatctgttgtcgcatttatctactcattattgattgcccgtaacatcgttaagaacaaggctgtgactggcattcttcgtgtgatcatgaacattgtcagaaccattcctgacttgcttcttggtgcgatcttcgtagctatcgtaggtatcggtccagttgctggtatcttggctttagcagtcttcacctttggtgtggttgttaagttgttctacgaagcaatcgaaacaattgatccaggtccaattgaagctttgactgccgtaggtgcaaacaaattgcaaattatccattacgcagttatgccacaaattatcacttacttcatttcatatgttctatatgcatttgaaatcaacgtcagagcatcaacagtccttggttatatcggtgccggtggtattggtttgaacttgcaacaaactttgcaggtcttcaattacgctcaaactggtacgatcatcatcgttattatcgtagttgttgtcttgatcgactacgtttcatctaagtcacgggaggcgttaatgaaataatggatactacaatgaaaaaattacccgctaaacccgttgaccgtaagaaacaagttgcacattggctaattgcaattgccactatcgtaattattgtttggtcatgtactggtattaacttcggtggtattaaagccactgctggtcaaattgccggtgcaatcttctcaggtattttccatcctgactggagctatgtttacaatggctcaggtgaagacttggtctcacaattgtggcaaaccatttgtatcgctttcttaggtacattcatttccgcaattatttcattgccatttgccttctgggcagctcacaccaagcacaagcattggtacacttcaagaatcggtaaaattgttttggcaattatccgttcattccctgaaattgttcttgctttgatgttcatcaaggccgtgggtcctggttctgcagccggtgttttggcattaggtttccactcagttggtatgcttgccaagttgttctcggaagctattgaaaacttggaagaagggccaaacgaagctgttattgcagccggtggttctaagttccacgtaatcatgttttcaactatgcctaacttgatgccagctttgatttctaacaccttgtatcgttttgatgtttccattcgttccgcatctatccttggtttggtaggtgccggtggtatcggttatccattgattattgctttgcaatatcgtcaatgggaccgtgttggtatcattttgctagggatcatcattatggtggtgatcatcgactggatttctggttggatcagaaagaagttagtctaattcccaaaatttgaatattaaagaaagcgaagacgaaaagtcaatgtcattaagttaagacattgacattatatcgacagcttttaaagatcgaatcattttgattcggtcttttttctttttaaaataaaaagtgagcagagtttatttgcctttctgctcactttcgtcatattatctggtctttcatagaaagctgtgcctcttatgaaatcccttcactcaaatattttaaagctgatggatagtattatcaataaaatcgctgacaacattcacgatttctctgtatctgatcaagcttttactcgctgtcgtaagctcaattccactgatttgattaagttaattcttaacatgggagctggcagcctgaattcggaaatttttcatgcttttcctgacataaattctagaatgactgcttcggcttttgaacaacaaaaggctaaattaaagcctgaatgctttaaagaaattatgttagaacttagccgggcaaataatgtactgcaattattagataatcaatacttagttgttgcgattgatggctctgattttgatcaaccttttaatcccgaatcagaaaatatttttcgaggtaaagatggtcgaatatactgtcaacttcatgtaaatgctctttatgatgtcttgaataaattatatttagacatggttatccaacccagacaaaaaatggatgaacgtgaggcagccttaactatgttaaagaaattagcccaacaagaaaaagatttcttagtcctgatggatcgtggctatattagctttaatttaattgaaaattgcaatcgattaaaacattgccactatgttatgcgatcaaaatccggagatggtgcttttaaagaaattgtagctatgtcgaatcatgaatacgatattgacttatcatgcagagtaacttcgtcacattattattatgtcacccataaagatacagaaaagtttcttcacctgattcttcacaaaaagcatcactataaagctgttcgttcaaaaaataccagagatcaacgctgggattttgaggatatgtgtgatgttagatttagagtttgtaagtttagaatcaatccaccaggttcagacgatgagtgggaagtcctcatcaccaatttagatcgaaatgaatatcctctagctagaatgaaagagatctatcatcttcgctggggaatagaaacttcttttagggagcttaaatatgacttaagcggcatacagtttcattctaaaaaagatcaatttgtttatatggaaatatacgcccattttgcaatgtataatgccgtgagtttatcaataattgcgagctcaaaaccgtatactcagggaaaatatcaatatcaaatagattttaaaatggcctgttgtatctggcgacgatattttagtataagtgataattcagataaaaacttcacacaattactgctggatgtggcattttatttaacgcctattcgaccaggaagaaaagataaacgaaatctaaaagttaaattagtagttggctttccttatcgtctagcagcttgaactaatttaaacgactatcttaagatggcttatttgtgctatcaaaaaagacatttatcgaataaaataattcgataaatgtctcaaaaagtgtcatcagattagtcaatgtcttaacttaatgacattggacgaaaagtccccgcttttttgttagccgtgaaatttaaattggcattgattaagatgatcattaattaatccgattccctgcaagtaggaataaatgactacaggtcccacaaaggaaaaaccatcttttttcatttgtttggatatcttctgcgataggtcattagaagcgggaacgtcatcaaagctggcaatatcatgcacaattggagtaggtacaaaattttgtaaatatttggcgactgaacaatatttttgttcaattgccaaaaatgcccgagcatttttaacagcagcattaattttcattcgattacggataatgcccttgttttgcattaatgactcgatatctttatcggtcatctttgcgacttcagagatctgccaatttttgaatgcagctttaaaattgttgcgtttatgcaaaactgtggaccagcttaaacctgattggaaaagttcgagcacaagcatttcatacaaatgtgactcatctagattaagtttgcaccattcatgatcgtgatactcctgtactgcttcgtcttttgtatcgccccatggacagcgaataatttcttgattcatatttttctctctttctatgtaagtaatgttttacccctctattatttattacgcaaaaaaatgcgattattttttgagaaattatatttttatgtgcgaaataagggttttaacagctttttttgctataattaggtgtgaatttcgaggaggatcctatggaaaaattagataccatgatgttggctgatgatttagccttatcacaagataaaattttaaatggcgaacaagactttggcgctgaagctgtttacaaagtaatcgataacttgggcgttttaaataacccaatcaaggattacttcgacatgactgaagaacaatattatgaagctgaaagcgatcacaaactaactttgatcaagatggacagtaagttgactgatttgcatgatcgcattttaactaaccatgttgatggttttgttgataaggacgagatcaacttaacctacaatcatgagaatctatatgaagatgatttatacgatccaactactgattatcgtgaaattgtttacagcttgaaagttattggtgcggttcaagcaattgcagctaaggacttgcaagaagtattgtctaaagatgctgtattatcaattggacttgccgcatatgctttagcacacaacgcataaattatttgagtcggctggtaagcggccggctttttttgcttttttgaggcgaaaagatgaatttgtttaaacacacaaagggaatagttgatcgaatcgttggcgccaaaaaacgctctgcaatggataaagatagtgaattgcttgatccgatgcaaaaatatactactgttggagaatatcatgttggtgccgttgatggtactccacatggtaaggactatgttttaaccgtttatcaagacgaagacggcgtgttgcgacaagcacttagtccagagactacaacgaaattagcaccggaatatttacgcaagtataatgcgaaactaggtcattttcgtgcctttcataataagaagacagggcgccgttattgggtggaaaattacttggataatttcactacggaagtgaaaaagcatattcgcccaggcactaattcggtcaatatcggtgtaattacagatactcactttaaagataaagatagcagcgatttttatggctttaatgggctgcaacatgtgcaagaattttcttatttagatcaatctggcttgctagatttaaaagtccacttaggtgactggatcgatggctccgatgctggcctggtcagtgaaagtgaattggtcaagctgaacaagtcttttaagtcggatcaggtgccatatttgagtatcaagggtaatcatgatgaaaatgataagtttgatgaacatcatgatttaaaagcctcatttccagaaaatgaattcgaaaatattatgtggcccgatatgtaccgacaacgaggaattcattatgtttcgcgccagcacggggtggcatactttgatttagatgacgtgcgggtgatttcagttaatacgtcagatgttccatatgaattaaataaccgcgggcaaaagcgctatgacaataagattgtattggctgtgcgtgaagatcaaattgaggaaattatcgaaattttggctaattcttccaacaaaaagatcatcttcatgtcccatgccaacccgattaatcgaaaggggtctaatgcacttaagtataatggccgctctttgcacgaactgctagttgcttttaatcaacgtgaaaaaggtcgaatgcacgctagcaatggtgttccagcagaatttcgtttatcaaatagttttgattttaccaatatcaagaatgcgagaattattgcctacttctgtggacatcggcatcgtgaagaccagtatcggatcaacgggattcaatatattttgtttaactgttctgccttgatggggccaaatcattccctaacaactaaatacaacaaaaacttagaccgaagaattgatcaaaataatgaatttgcgggttatattgtgaacgtcgatttaaaacgacaccgcattcaatcctttggctatggtgcagcttctagacgccgggtgtatttcatttagttaaggaatagtaaaggtatttggctattacaagtgtttagcttataataaaaaggttaaagtaaaaaatagtgaatattatagcaaatattaagatttagagaattgacttaggggaatttaaattatgtgcggaattgtcgcgttttatgatccaaagataaatgaaaagcaggctgtcattggcaaaatgatggccacgattaaacaccgcggacctagttccgacgggtattatactaatgacgaggttgcccttggttttagaagattatcaattattgatcttcgtgggggtagccaacctatttataatgaagataaaactagagcaattatttttaatggtgaaatttataactttaagccattaagagaagaattaattaaagcaggccatgattttactactaaggctgatacagaagtcttacttcatggttatgaagaatggggcatggatggcttgcttaagcgtgtacgtgggatgttcgccttcttaatttgggatgacaacaacaagaccctttatggtgcacgtgacttctttggcattaagccaatgtactacagtaatcaaaatggccatttgttggttggttcagaattaaagagctttttggaatttccaaagttcaagcgggaattaaatgttgaagcagttaagccatacttgatgaatcaatacaatgacctagaagaaaccttctttaagggcatttaccgcttcccagcgggccattggtttgaatacaaagatggtgaaatgaagacccatcaatattgggatgctgaatataaagaaaatagcctttcctttgaagaaactttgcaaaagatcaacgaagatttgaaagaaacggttgatttgtatagaaacgctgatgttaaggttggtgctttcttatcagaaggaatcgactcttcatacttgactagtttgcttaacccagatgacgttttctcagtaagttttgatgattcaacttatgatgaagcttctaaggctaaggcattagcagatattaatcactggaagttcttcagcgataaggttgatgctgatgaagcaatgcgtgacttcccagaaatgcaataccacatggatgaaccagatgctaatccgtcaatcattccactctggtacttgtgtaaactagctcgtaagcatgttactgttgctctttcaggtgaaggcgctgatgaattgtttgctggttatgtgaactacgggatgcatacgcataacgacattattaaggtctttacttcagaattgaaaaagttgcctgagaagaagcgggttaaattggcacacaagattaagagaatgcctaatttcccaggtaaagttcacatgtacaccaatttagctgaaccgagtgaattttatgtcggtcaatcggttatctatgacatggattacccaactatctttacttctaaagatgctaatagcattttacagccaacgtatcgcaataaattgactgttaacggcatttaccaaaaagactttaagaaagtaaagggagtcgataatgttaagcagatgcaatacattgacttgcaccactttatgcttaacgatattgaacaaaaagctgataagatttcgatggcccattcacttgaagttcgtgttccttacctcgacaagaagattgcggaattggctaactctatcccaaccaagtacttggttaaccgtcatgataccaagtatgctttgcgtaaggcttcagaaaaagttttaccagatgagtgggctaagagacctaagcttggcttcccaactccaattaagcaatggttgaaggaaccacgtttttacaaacaagttcatgctctttttgaagaagaatttgtcaacgatatttttgaccaaaagaagattatcaagttacttgacgacaactatgaaggtgatggctcacatagacgtcaaatctgggctatctataccttccttgtttggtacaagttgttctttgttgattacgaaaacacagttaagaaatatcaacacgtgcaacctgaagttgctaagctaatttcacagggtaaattactataattctagggagattttttgaggatgagtaaaaaatttacgccgatcttactcggtagtgatatcaacgtgtatggtatggcacgttcatttaatgaagcatatggcattaaagtgaaggccttagctgacgttcaacttgctgctactcgttattcaagcattgtggacgttgaattgcatcatggctttagtagcgatcctacttttatggacgtgatgcacaaaaagatggaagaatacaagaatcacgaggagccagttatcttgattgcttgtggtgatggctatgctgagttgctttctaagcaccaagatgaattgaaaaaggtctttatcgttccttacataaaatatgacttacttgaaaaattaatctctaaggaaggcttttatgaaattgcggaagaatatggcttgccttatcctaagactaagatcattacgatggatgactacaagtcaggtaagtacgaggatgtcccatttgatttcccagtggaattaaagccggaagatccagtttcatggttgaagtgtcaatttgaaggtcggaagaagacttttgccattcaagataaggctgaatttaaggatatcgtaactaagatttatactcatggctacaacgctgaccttattttgcaagactttattcctggtgatgattctaacatgcggaccttgaatgcttatgttgataagaaccaccaagtaaaaatgatgtgtttagggcacccattattggaagacccaaccccacaatcaattggtaattacatggcgattttgcctgagtacaatgaaaaattgtacgaagaagtacaacaattccttgaaaagttgaactacactggtatggccaactttgatatcaaatatgatccacgtgatggtgaattcaagttcttcgaaatcaacttacgtcagggacgttctagcttctacgtaactttgaacggttacaacttggctaaatggtacattgatgactatgttgaagatgccttgaaagataaggaaacagtttatggtaataagcttgaatctaaatacaagctttggttaggcgtgcctaagaagatattcaataattatgcttatgacaacgactataagacgactgctgacgaacttattcgtgagggccgctatggtactactgtcttttatgacaaggatagaaacttcaagcgctggttattgatgaagtacatgttccataactacttcaaacgttacaagacttactatgaagttaataagggtaagatctttgacgaagaaaataaaaaattaaacaaatagtttaaattgagaggtaaaaaatgcctctctttttttctaaaaaattttagctgaatcatttcccaatttaatggtcttttggttaatacaagatatattcatctatatttgaacacaatacaagatgttgtgttttatgctatgataaagacacgagatttggagtgattgaaatgctaaaagaagaatttaaccaacaaaatgtaacaaaatttaatacgcctaaaacttttgttaaacgtgatgggtcaaagtatccgttcgcaatttttaaactcaacatggttttgcataacctagatttagataatgtagcacctgctgtaattgaaaaaattgtggctaaactagatgctgctgatgaagtaaatgcacaagatgtagcagttgcttttagagatagcctaaatgagttgggttatttggatgaagctaaagcttatgtgcaataccgcaagcacgatgaagaggaatggattaaacaaaccgatactcgtgcacggttaaagcgaatggttaatggtgacccaacgattgttaacgagaatgccaacaaagatagtgaggtcttcagtactcaacgtgatttaactgccgggaccgttggtaaaacagttggtttgaccatgatgcctgagcacattgctaaagcccacttgcgcggtgatattcactggcatgacttggattacacaccactttcaccaatgactaactgctgtttgattgactttaaggatatgctaactaatggcttcaagattggaaatgcctatatgactagtcctaactcaatcaatgtggctacacatcaagttacgcaaattattactaatgtagcttctagtcaatatggtggctgttcttttgatcgagctgatgaagtgttagctccttttgcagagaaaaactaccaaaagcatttaaaggatgctggcaagttcattgatgatcctgaaaagctggaagaatatgctaagagtcaaactaagaaggacatttacgatgccatgcaaggcttggaatatgagattaataccatgttctctagccaagggcaaacgccatttactactttaggttttggtttaggtacttcttggattgaaaaagaaattcaaaaagatatcttgcgtatcagaattaaaggattgggtagagaacgcagaaccgcaattttccctaaattagttttcaccattaagaagggcttgaacttacatccaggggaccctaactacgatgttaaacaactggctattcaatgttcaactaagcggatgtatccagacgttttaatgtatgatacgatcaagaaaattacaggttctttcaaggctccaatgggctgtcgttcattcttacaaggctggaaggatgaaaatggtaaggaagttaactcgggcagaatgaacttgggtgttgtaactgttaacttgccaagaattgccatggagagtcatggcgataagaagttattctgggaaatcttcaatactagaatgcggacttgccaccaagctttagcctttaagggtagacgtgcaattcaagctaagcccgaaaatgcgccaattatgtatcaatatggcgtctttggtaaacgacttaagccaggtgatgatgttaacgagcttttcaaaaatggtcgagctacgatttcgttaggctacatcggtttgtacgaagtagggacagtcttttatggtcctgattgggaacacaatgaagaagcacatgattttacaattgagatcgtgaagaaaatgcatgacttgtgtgctaagtgggaaaaagaggacccatatcattggcattacagtttgtactcaactcctagtgaaagtctaactgatcgcttctgccggctcgatacggcaaagtttggcaaggtgaaggacatcactgataaggaatactacactaattcgttccactatgatgttcgtaagcacccaaccccatttgaaaagttgacttttgaagcaccatatccatattatgctgcaggtggttttatccattattgtgagtaccctaacttgaagcaaaatccagcagcccttgaggcagtttgggattgggcttatgacaaggtaggctatctaggaactaatacgccaattgataaatgttataagtgcggttttgctggtgaattcaagtctactgccaagggttttgaatgtcctaagtgtggtaatcatgatcctgctacttgtgattgtgtcaagcgaacttgtggctacttgggcaacccattgaagcggccaatggttcacggtcgtcatgaagaaatcgtgcaccgggttaagcatatggactttggcatggaagatagtttagctaccgaagaagaagtaaaaaacggtgagtactaatgcctgaaaaagataaaaacactcaagaaggaccagatatccggagtaatttgatcaaggttaatatgggtggggataccatgtttgtggatcctgaccaatataagccacagttagatcaccaacgtgagttaaaaagaatgcaccgcaagccgaaaaatccaaaaccacaagagtggaagactgaggattattctaaacataaaattgcggattataagccatttaactttgttgatggtgaaggcgttagatgtagtctttatgtttcaggctgtttgttcgattgccctggttgctataatttagcagcccaaaactttaattatggttttccatatacgcaagaattggaagaccgcattattaaagacttgggccagccatacgtgcagggattaaccttactaggtggagagccattcttgaatacttgggtttgtttaagaattattaaccgaattcgaaaagaatttggccacagtaaggacatctggtcctggtctggatatacttgggatgaattgcaaaaagaaacacctgataaaaaggaaatgttgtctaagatagatattctagttgatggccgctttatgaatgatttaaaggatttaaccctgcaattcagaggttctagtaaccaacgaattattgatgtgccaaagtcgatgaaggcaggcaaggttgtcatctgggataaattgcaaaaataagataaactaaagtccggaatgattttctggacttttttgctaggtgaaaaaatggaagaaaaaaatattaaacaagttgatcaaatcatgacggccttgacccaagtgattgatccagaattacaagttgatgtagtaaatcttggtctgatttatggcatcgatatcgaaggagataaggcaaccattaagatgactttgacaattatgggttgccctttatctgattatttggaacgacatattcaaaaagctgttctttcagttgctggaattaagtcttgtgacattaagttggtctggtatcccgtctggacgacagagcgtctttctagtgcagctaaaaagcaattaggtgtaactaaccatgatgatcaaattaagcaggagaaagccaccaaagagaagattatcgacttttcagtaccgatcaagaaaatggcagatgaataccctgactttgttcaaattatgtacgattgtggttttactagaattaaaattcctggattgcttaaaacggtggggcgtgtgatgaccattccattgggagcccaggcaatgaaacttgatttggctaaagtgaaaaaagcatttgaagataaaggatacaaggtaatcaatgactgataaaaaaagacaggatgcaatcctgaaaattttgcattatattcaaaacggcggcgattttgcgaccgcgaagaagatgtttcaagaagaattcgatcaggttgatgtggccgaaatcacagcggcagagcgcgaattaatcaagcaggggttaaacccagcagagattcaatacctgtgtaatgtgcatgccgatgtctttaagggtaatatcaaggagaatgcggtaaatcctgattttgctactccggggcacccggtgcatacgattaagctggaaaatatggtactgaaatcattggttaatgacgcactcttgccagatttgaaaaagtatcaagcaggtcaagatacactggataaaatcagaaaagaattgagtgatttggcaacaatcgataagcattaccgacgtaaggagacctcgctttttccattaatgaataaatatggcattacagctccgcccgaagtgatgtggggcgttgatgatgatattcgcgatttaattggggatgcaagcaagattgctggtgaggagcatccagataaagatcagttggctgaggcaattaaaaaggcgagtcatgaagtgcttgagatgatctttaaagaggagagcattatgattccgatgattgacgaggtagctgatcaagatgattggtacaacgttaaacgcgaagagagtcagattggctataccctgattcgcaagccaatgaattggaagccaaaggaagctaaaaaagaagcagggcctatttctgttagcaatctttcatccttcctcattaattttgaagaaggaaggttaaatttagagcagttaaatgcaattttggatatgttgccatttgcattgacctttattgatgaacacgataaggtagcttattttggcggcggtgctgagatttatccgcactcgcgcaatgctattggcaatgacgtattctcgtgtcatactgctaaaagtagaccgttaattaaaaagatttttgcgcaatttcattcaggtgaagttgacaagtatgagtttcactttactccacacaagatgaagcgctgcttatacctacgctattatgcagtacgtgataaaaatggaaagtatctgggttgtcttgaggtagcacaagatgtgacagaaattagaagctggactgaagaaaagaaaaaaatttaacttgttgggctgtgttctagtaagggatgcagctttttcttttgccctcgtgcaaaaaatcacaattcttgctagactagattgagagaatgattaaaaagaagggaagagagaaaatgcgcacagcacatggaaaacaaccagctgatgaaatcaaattgcattggcttcttctaggccaattactaacgtggttgggttccagctttatttggccattgacttcagtttacctgcacgaccatcttggcgtttcactagctttagtgggtgtcgttttactgttcaactgtgttgcaaatatgattgggtcatttatttcaggctggtgctatgaccatatggatccatatgtcttgctgattgtgggggctgctttagatgcggctgtcttgtttggcatggctttgaatcatagttggccgttatattggctctggatgactttaactggctttttgggtggctggaatggagcattgattaactcgattgctactagtattaaatctaagccaggtcgttatgtcttcaatatgatctactttgctcaaaatgttggggtcgtttgtgggacattagcagtaggttatctttatgattattcagtgactttattatttgtcattgctggtcttttattcgttggcgtttgcgttaacgcaattattaattatcggccaatgattcagttccacaaggagcgtttggctaacaaaggcgaatcaaagaagaagacctttgagccgatgccaaaatacaatctgattatgtcaattggcttttttgttacgatcgctgtaatttggttgatgtacatgaactgggaatcaaacttgtctgtctacatggtttctttgggcattccttttcatctgtatagtttgttatggaccatcaatgccggaattattgtcatcgtgcaagctatcttaagtcgttttactatctttaagagcttatttagacaaattttatttggcactttgatgtttgcaatttcttttgttactttgatttttgccaaagattttgcacatttcgccttatccatggttatcttaactttaggtgaagcaaccgcaatgccgtcgattccaacttatgtcaatgatctgtcgcccgattctagtaagggcaagtatcaaggcttaaccttgtctgcatcgtcaattggtcgagctctaggtccattatttggtggtttaatcattgaagatttcggctatattcaattctttgctgttgctgcaattggtatctttttgcttttagtcatgcttattccaatgcatgcgaaactacagaaaaaactaaaattatttgtaaaataaaaacaacatgatagcgttaatttttttataatgctatcatgtctttatatgaaaaatttttccactagggaggtaatttaatgtattttaacgtacgcggcggtgctggtgacattactaaggctaatacttcagcgcgtctacaagataatttatatttggccgttaactcagaatggttggaaaaggccaaaataccatctgatcgttcaagaaccagttcatttgatgggatcgatcttaatattgaaaagaacttgatgcaagactttgcagattttgctgctggtaagaaggaactgcctactgtgcctaacttcaagaaggcagttgagctttacaaggttgctaaaaactttgacaagcgaaatgcggatggtgccgcacctattcaggcagatttgcacgaaattttagacttgcgcaacttcgctgactttaacttgaaggcagcagatttttacaagaatggttttgccgttccatttgctttcagtgttgaagcagatatgaagaatactaagattcactcattgaattttggtggtccaagtactttcttgccagatacgactacttacaagactccagctgctgagaagttattggatgttttgaaaaagcaatctattaagttgttaacaatggccggacttgatgaaaaggacgcagaagattacgctgacttggcaattaagtatgacgctaagattgctaaggttgttaagtcaactgaagaatgggcagattacccagcaacttataatccagtttcattgactgactttgaagcaaaattcgattccttcaagatggattacttcttgggcggattatttaccaagaagccagaacggataatttcaactgaaccacgttacttagatcacgcggaagaattgttgaatgaagaaaactttgctgaaattaaggcttggatgctggttaagtttattaatggcgtagcttacagcttgtcacaagatttccgtgaagctgcctttccatttagtcaagctttgtcaggccaacctgagctttcaagtggcgttaagcaggcatatcatattactaatggtgacttcggcgaagtagtaggtgtctactatggtcaaacttactttggcgcagaagctaaagcagacgtgactgatatgattcacaagatgcttgatgtttatgaaaagagaattcgtgaaaattcatggctttctcaagcaactaaggataaggcaatcgttaagttgcgcgctttgatcttgaagatcggttatccagacaagattgaagaaatctatgaccgtttacaagttgatccaactgctagcctttatgaaaatgaagtgcaatttggtcgggaacaaattaagtacaatcttgagaaattgtaccaagatgttgaccgtacggtatggttgatgccaggtgatatggttaatgcatgttacgacccacaaagaaatgatttaactttcccagctgcaattttgcaaaaaccattctatgacttgaaacaaagtcgtgctactaattatggtggaatcggcgttgttattgcacacgaagtatcacatgcctttgacaataacggtgctcaattcgatgagtttggtaacatgaagaattggtggactgatgaagattttgctgaattcaagaagagaacgcaagctgaaatcgacttgtttgatggtattgaatatggccctgtaaccttgaacggtaagcaaatcgtatcagaaaacattgccgatcaaggtggtttgactgctgctgttgaagctaacaagggtgaaggtggcgacaagaaggcaatgcaagaattgtttgaaaactttgctcgtgtttggacaactaagcaattgccagaatcaattaagacgcaagtatctatcgacgttcacgcaccaggtccagaacgtgctaacgtgcaatcacaatgccaagaagaattctataaggcatttgatgtgaccgaaaacgatggcatgtggcttgctcctgaaaagagagtagtaatttggtaagtaacttttcttaatatcgagtatgaaaaattagctaaattacatataagctcctataacaagaatgactacagtgctgctactacactgcagccctttataacttattacccattaataaattttttgcactaaaaaaggctccctgttgggagtcttttttagtttagtaattatttagttttagctgtcgagtaatcctttggcttaatccgcttaatgtaagatggatttggtcgacccaggattaatggtacacgctcgattacggtatcggcgtattctaagccgaaccaggaagctgggttagaagacaagttttgcaagcgaacccgcgcttccacaagccatttttcatagccaaccaattgtgtttgtggactgatgacgtcgttaacaataacgaatgagaagtcacctacgtcacgacctgggctggtggtgtattcctgtggttgtggctcaatcgtaccgtcggcgatcaagtcatgaacgatctgacgaatgtagacattcacactagtttgcttcttaaagccgaggtagagctgaatgttaattacgttcttcgtaccgtaagtgttaacagcatattcagcggtaaatggctcgttagtaacattgacagtgacaaaccagtaagcctttgctcgtttaggtcttttatccaaaattgagtacaggatttcacgtttgatgaacttattgtacttaacgttggccatgtaaaccaagttggtagcataagttgggtaattttcatcgtgacttaagttcgttaacatgtcggtatattcatctaagcgaacgtaagcattgcgagcttcacgcttgtcacgaaccttgttgccgtaataccaaacatacattatgaagccgatagcaccagcgatgaagagtgaaacgtaaccaccatgagtaaatttagtcaaacttgaaatcataaacatgatgtcaaggacaccgaagaagatcaagaagatccagttccaaacagtgttgactttcttcattactaaccattcataaagcaggatggtagtcattaacattgaaattgtaatggacagaccataagctgcttccatgtgagctgaagtttggaaatataagacgattgcgatagtagcaacacagatacccttgttaatggaaggaatataaatttgtcctttttcgttagatgggtagttgatgttcattcttggcaagaacttcaagcctgaagcttctgcaactaaagtgaatgaaccggtaattagggcctgagaagcaataacagcagcaatagtagccaaaatgatggcaaacaatctgatgttagctgggatcatttcaaagaatggattgagcacaccgccgtctgcaggacggtaagttgggttgttcaaaatccaaacgccttgaccaaagtagttgagtgacaagcaaacaaaaacaaatggccaagaaccaataatattgcttttaccaacgtgaccaacgtctgaatataaggcttcggcaccagtcgtagctaggaaaattgaccctaaaataaaaattccagccttattatatggactgactaataatctaatagcgtaaattggattgattgcttgcaagattgaccagtcaccgaccatgttcattacgcccattacacccaaaaaagtgaaccaaaggaacatgattgggccgaaggctttaccaatgatactagttcccattttttggatagaaaacagaactagcagaatgactacagtgatggcaataaccatgttttgagtagaaacgggtacattgccgccaaagttcagtcctttcagtccttcaatcgcagttgtaactgtaactgctggagttaaagtaccatcggccaaaatagcggctccaccaattagcgctggtagaactaaccatttagctcgttttctaaccaatgtgtataaggcaaaaatcccaccttctccgtggttagttgccttgagggcaataattacggtttgtaaggtagttagtagcgttacagtccaaagaaccaatgaaattgatccaatgataaagtcacgatttacattaccaatgccgccgttgccttcgacaattgatttcataacataaagcggactagtaccgatatcgccgtaaacaataccgatggcgattagtaagccggccgcgctcatgcgtttagctttattattcattatctcgttatctcccacaacaaaattgtagttttaataaaaaaagaaaatgccacgatgacattttcccttattgtacctattttcgtctatttcgctggacaatgcaagtgagatttgtcagaaattgaatctagaatttggtgatgataaagttaatgcattataataaaaaatatgcagtaaaaaagctcccatacagggagcctttttgatataaattatgaaagtgatgaaggaatcttagtacgttggtcttcgtcccatttttcccatgcttcataagtaagcatttcttctggcttaacaccagtcttttcttccatggccttaagcaagtccttaaagttgtagtcgtggtattgtaacacatgatcaaccaacttcttgcgtgggaagtggatgttgtttaaaacatagcgattgatatcaaccatgttatgattttcatcgtaaaggttgataacttcaagatcgtcttcatcgaattcagcgatgtagaagttagcgaagacctttaagtaatcaggttgttctttgaattcttcctgtggcatagtagtcttgttagcttctggcattacgactttaaagtcgtcgttttcttcattttctttatcagcttgagcttgagcgttcttttcttcttcagtcaaagttgttacccctttatttataaataaatagatacaaagtcaataataattttacagacttctacaaataaaagcaaatagaagtggttgagagatgcaaaagtatagaagtcagttttgattagtaaaatggagtaaaatgaagtaaaatataaatgtaaaaagtaaaatgaagtaaaatgaggaaaaatatgtataatgaaaatccttttgatgctgaatttggcgggatcccagagctatatcttgattttaatgatgatgcagttaaatttgctcaaagagcccatcgtctcaagaaacatccaacttattctctctttattacaggggtacgaggttcaggaaaaacagtttttatgaacaaagtgggtaaagaactaaaaaaatataaagatactatggtagtcactttgcacaattctgatgatctttttcgaatgatgtatatcaagctagtgcctatgctagataaaatcaaaaaatggacgccatcaatttctattaaagttccttttgtatcagtagatttcactgaagcaaatgaaaagcatgatgaaatatattataaagtagaaattaacaagattcttaaagctttgaacaaagtggggattcgtgttgcattttgtattgatgaagtgtcaaatacacccacaattcaaaaattggctgaggaattcaacgagtggagcctaaataactatcaagtttcagtgattatgaccggactattaagtgaagtggcggaactatcaggcacacataatttaaccttcttggttcgggcggatagatttcacgtctctaaactatttgcgtcgtcaattgccagaacttacatggatgtattagacataacagctaagcaagcagaaattttggcagatatgtcaaaaggctatgcttatgcatttcaattgatcggagatttgatgtatgaaaatttaagtcaaaagatgacgtttgaaaaagctttggaatatactaaacttagattccgtgatgtacttttcaaccaagcgtatgatgtaattgctcatgaattaacggatgtggattttcaatttttgtacgctatggcgcaagataatagtattagttcaattattaggactatgcaaaaaagtaagcagtatgttaatagctatcgtgcaaaattaattaaatatgatctaattaagccaataattaggggaaaggtcggctttaccttacctttgtttagagatttcattcaagcaaagtatgatgagcttaactggggctagaatttattgaaaaaattcggcagaaaatcacagaaatgaacgcagatccagtttggagggatactattatggactatgagactaagctagctgaagagcgtgaatacggtgaagaaaaaggaattttaagtgcaattaagaaaattatttatcgtaaccggagctatggtgtatcagattccaaaactttggaggatctgacagaagactaccatgattctgtttcccgggatcaaattgaacaaatgatgaaagaagcctaggtctaatgaaaatagccgctgctcaatgtgagtaacggctatttttttacttgttatcatcagcagcagagctggaacttacggcagatgattgatcgttgcttgaggaagccgcgctggattggttgatggatgataatttaagtaattattcttttgaaaaaatatttcttacttgttggagtaaattatcgaattctgttgattcttttatgtggccgattatttttccatgacgggcaatgaaatcatacgatagcatttgaaataataatgcatctccatttgtgtgactagcataatctagcacatagaatctaaatggatcatctgtaatatggttatgagtaattgctagtcctattactaatccagactttttagtgtaagcatgtctgctcactactaaatagcgtctacgaatatttcctttttcagaatcatgtccacccatttcgtgaccagcatgtggttcagcatcgatcattattatgtcaccttgatggacatcaatccttctcatttgctagttcctttccgacaggtttgacttctctaggattgtatcctaattcttggtattctcgctttatttcagtatcataatcataatcgtcataagcggggtctgaccataaatcataattgtttttagcaattcttttgtatacaatatcaccgtttttatttacatcaacagagaattctgtattaagtggaactttgatagtacttggaatggtaagcactattgaatttccttgttttctagccttgactaccataataagccctcctcgtattatataaattgtaattagtcatattgtgataattaatcaaattagtatttgctttttgatcttcacatgttagcctctaattgtcattggctttggtcaactggtctaggttatcacctcctgcagttttgtctgctttataagtctgccacccagacagttcctttatgctctaactcacatgctgtattgattgcttctttttgctagtccttgagcaattgggattaggtgcagctttcaaagaagcaaccagtgaatacttatactggcgagattgaacttaagaactgtaattaggggttaacatgtgaagatcaaaatctatgatcagaaatttgaaagaaaggaggccatttccaatgaaattatttgtcggtattgatgttagttctaaagatttacaggtcgttgcacttgattcagaagatcaaaacaaacgcttaattaacgatagctttgtcaatgatctttatggtgctagtgaactgaaaaaacaaattttagatctagctcaaaataaacactatgatcaaatcattattggcatggaagctacatctatttacagttttcatcctgcttactttttccaaaatgacgaagatttacaaaagctcaatgtagagactgatgtaattaaccccaaagaaaccagcaggtttcataaagtctttgaagaaagtaaaactgatcctctcgatgcttattacattgctttgtatctaagctttggacattatcgagtaagcattgccagacaagacaactatcttgctttagagcgtttaacgcgtaccagatatgaattagttcaagaactgactcgtaccaaacagcacttcattgaagctttatattatcgggttaataaactaatcactgtcgataaagataagattaatactcctcttttcggtgctacaatgatgtctattgtaaccgatagtaaaactctggatgagatcgcggatatgcctaccgaagacttaatttcttacttacaggttaaaggcagaggacgcttttccgatccagataccttggctaaagcaattaagaaagctgttagaggttcatatcgcttaggcaaagtaatgactgattcaattgatgcagtgctttctgttcattacaacatgattcaaagctttaatgaatctattaaagatctagaaaaagcaattgatcgtatcgttgatgcattaccagaaagcaaaattctggaatcaattcccggtattggcaaaacctatacagctggtattatcgctgagatcggaagtatcgatcgctttgataaagaagaacagctggctaagtatgccggcctaacctggaatcaatatcaatcgggagatcacagcaacgaacatactccaatggccaggactggaaacagatatctaagatattacttgattgaagctgccaatctagcaagattacatgatcctgttttcaaaaaatattaccaaaagaagtatgatgaagctgtctactcgccgcataaacgtgcttgcacattaactgcaagaaaattagtacgagttatctttaaattgctcaaagatgacaaactgtacaggacaccgaggtcttaatttcaaaaattggtctaaatttaaaagtaaacaaaagtttaacattaaaaaaatcaacctttaccaaggcttagtttcatatactcaaatttatgatcaaaaagaacaaatatcatcgcctttcatttgacttattaccacatgacttatgctaaaaatattttattatttaagtatatactgtgaatacagtgagcacaaacaaaaggagccacaaattggctcctttttcgtttgcttacttgttatcatcagcagcagagctggaacttacggcagatgattgatcgttgcttgaggaagccgcgctggattggctgctggatgattgttcctgctggtgatcgcttgaagaagatgaagaacttgattgatcatctgacttcttgtttgatgagctggacttcttggactgctctttatccttatcagatgaggattttgcagaatcatcctgactagaattatctttgttagaatctgcatcagaattattagatttttgctggtcaggatcagcgttctttttattggaattattataggaagtattattgtgcgtttgagtgttggcatggctaatgtaagcaccggcgccacctccacctaagatgaacatcgcagcaataacaccccaaaagactaatttcttcatattaagacaactctcccttatcttagaaaaaatattaacgaatttgagccaattggtgactttgaatcgttagttatagtgtaagacatctggccggcaggttgattacaaaatactcaattttaactaattattaagaggtagaagaaaaatatgaattacgaattaactgaacaatcaatccaatatgtatttggcaacaagaagtataagaatgggcaaaagacccgtaacttgaagaacgtaaagactggcgctaaggcagatgagttgcaaaaggtgggtcaagcaattgctagtttgcaagaagactcacttgatgaagcatacttagtgcagaagtcacgtcttgtaccagcagctgaataaattaacgaacatatttaggaaataaggagaaaaaatgatggctaaaactactaagactatgaagttaactttcttgaacggagaaaagaagaaaattagtattacgttgggggatgcagtcgataatctaactgcggatcaagtacgcggtgcgatgaatacgattgcggaagccaatgcattcgagaaagacggtgttgcatattatcacactcctcaatcagctgcatacattgaacgcactattactgatatctttaatgattcagcagaatctgcagttgagcctgcagctaagcaagactaatctggacttgcttgaccaactaattagcttggtcaaaaggctcaggagaaaatatcgcaagatgtagagttcacacttagacctttaacagaaatcgtatagtaatattactttttcaattgattttgttacatcgttgtaaaatttaagaaaaagtaaagaaacagtaaagcgggcgcatgctcgctttttcttgttgtgtctaggattacggcattttgttattttagatttgtgtgaatggtattgggatagggaataggtgaattattacaaaagcaagattatagtcaatttaacttgctattttttcaagaggttagtacaatatgaatcgtggtaagtaataggacgtgcttcaggcgtgtcgcctgtacgcatgctgatccttcagcaatgactactacctcatgagagttataaactcatggatcttgctttgaagaattttgtacattataggctccctacatgctgaacctatggcctattacattttttatatttcaaggaggaaaagaccacatgaagaaaaatttaagaattgttagcgctgctgctgctgctttattagctgttgctcctgtcgctgcttcagctgtttctgttaacgctgctgcaaccactaccaacacagtatacactgtaattaatgctgatggtaccgcaatcaacactccagctgatgcaaaatacgatgttgatgtaacacctaaccttactgctattgcagcttctactgtaaatggacaaactattaacggtagcattactggtaacattactgctagttacaatggccaatcatacactggtactttagatactaagaatggtaaagtttctgttactgattcaaagggtagaacagttactcattttgcaaaacttgctaatggtttatatactgttactgtaaatggtgtatcattcaactttggtactgctaacgcaaacactactatcactcttggctcaaagaacagcaatgttaagttctcaactgatgagggtaagagctttgctaacactaaaaaggttgaacttggccaagatggtactttaaagaatcctatttcaattaaagtttcaaacgttaatgcacttgacctttcaaatgctagcggtattaacttctacaacgcttcaaacagttcacaagtaactaagggttcagttaatgtaactgctggtgttaacggtcgtttgaacgtttcaactgttgctagtgaaatcttaaagaactttgctgcttaccaagtttcaaatggtaaggctgtatcacaaatgccagaccaaaaggctgtagttgctgatgttaatgctgctttaaaggctgctaatattccagttgacaatgctggttggtttgctgctccaacttcattctcagttaatgtaaaggtaacttcatcaattaatggtgttgacgctactttacctgtaaccgttaatgttgctaacggcaaggacactactgtaccaagccaaagcaagactattatgcacaacgcttacttctacgacaagaacgctaagcgtgttggtactgacaagcttacccgttacaagtcagtaactgttgctatgaacactactactatcaacggtaaggcttactacgaagtaatcgaaaacggtaaggctactggcaagttcatcaacgcagacaacattactggtactaagcgtactttgaagcacaacgcatacgtttacaagacttcaaagaagcgtgctaacaaggtgaccttgaagaagggtactgaagtaattacttacggtggtacttacacattcaagaacggcaagcaatactacaagatcggtgacaacactgaaaagacttacgtaaaggcttcaaacttttaattaagtctatgtagtagataagataaaacgaggcaatttgcctcgtttttctttttgctctagaaaaaggtaccgcttgttgcgacaccctcggaaaatattattgttataacctagctctgcttcagaaattcttctaactgtttatcagagaacacattgccatacttttgctttaattgttgcaggatttgttggctagtgcagccaacatctttcaaagaagcgactaatgtaagtgcacctgttttaaggcctttcttttcaccaacttgctcgcgttcaagcattctagtttcaaaatccataatagtgtccctccattctggatcggcattcattgattcaatgcgtttttgtgccttatcaaaaagcttgtcaccatgtactggctaattttaaatccaactctataaaccatttgttataataaacgttgacgtttatgccttccaatatcagatctcgcattgggaggtgaacacatgctagatttgtttcactttttattaggctctatcttagcgccacttttagtgaacgtagtttcttatgtcttagagagactatttgacaagcggctaggcaatggtcatagcaaaaggcgtaaaaattatagattgggctctaaaagacatcacaagcgtcactagcctcagccaatacatttagttttaatgctataaaatttggtgaaacaaaaaatcgttactcatttgtccgattagagtagcgatttttttgtgtcttaactctcgcacatgcaagtcgtttcacttttatatatacatgttagcatatttttctatatttttctatattcagggtttgtttgcagtatttacgtttaaattaatgttttggctctaaaaaagatgccgcttatgcgacatcttggaaaatattgttgttacaacttagctctgtttcagaaattcttctaactgtttatcagagaacacattgccatatttttgctttaattgttgcagaatttgttggctagtgcagcctacatctttcaaagaagcgactaatgtaagtgcacctgttttaaggccttgctgtaggcctttcttttcgccttcttttctgcctttcttctcgccttccatacgacctttcttttcaccaacttgctcgcgttcaagcattctagtttcaaaatccataatagtgtccctccattctggatcggcattcattgattcgatgcgtttttgtgccttatcaaagagtttatcgccatgtaccggtaaatctttcatgagtttgactaaattaagtaatgtttcagtctcggttccatcaggaactccgtttgaattaattataattttagtcaagccatcctgcaatatatctgcatgattgtctacattaatagtttggtatgtagacttgattgcaactttttgcttagttttgaacgtgcaaagaaaaataatgaagacatttttcaaattattgtaagtatagccctggtggagagtatacctttgatcgtttttcgaagcataatagcgcatgcgacgggcaatatcgtcatcgtctgaccgctgcatctcaatattgtaaaggttgccgttaatatcctcaaccaaaatatcgagtcggacatctttttgatcccgatgctcaggatcgatgattacttcttgcttcttaggcggaaagatcttcttaattaggatctccggcagaattccttgcaaaacatgcttgcagaaagctggattggacatgatttcgccaaaaaccttatcttctgaaaaaccaaaccataattctttttgtttgtgcgtatttttcattgcgcacctctttctaaaaaatagtaggataaaatgtaccctctattatttattacacaaaaaatcggcaaaattttttataaaattgtttttttcagcataataatttctagctatacaatcaatgcttcatactgtataatactattcaatatttgaaacaatatagatatattcaaacatagggagtgtgatggatgtgtcagcctacaagcaacgtaacttggggattattagcttgcccactgacataaaatatcgtaattggtccaaggaccttaccaagcggagaattgagaatgactcgcaattagagcaatacatcaagtatgacaataaatatcgactcaataagaacacattggcagtctatgagttcaagcaaaatcctatcttaggcaaatataaggcagtagccttcgacctgaatcgtggaattgtgcttagtcagaagtcaacacatgccatgatgcaaggattgatgcggcatgccgtacattgcgatatgatttggcagagaatgctagctcgcgaggctggagttgatatctatcaagggattgtcatgtacaatgtgctttatttttcaatgcatgcatttagtggaaacttcttcacggactggatttgcttgcactggattaaagacttccacgtcaaacgccatgatcaagctattttcaacagtattgcacttgatgaaaacggcttggtttataattttgcttttgattctcctaagcccaatcttacgaagataattggtcagtatctgtttcataatcattattattctgacttatattatcagcatatgttgcaagaaaataatcttcgcgtaacagccattaattctgattcaatcctgcataattctaactattatgtgcaactggacttgtacgctattgatagttttaaaaagctggcagacaaattctacaatcatgttttgaacttacacctacttacgattgtgaaagaatttaagccattagattatttgcaccgtgaacaccgcttttttactaagcagattattaagatcagatataatcgttaacagctctcatgagctgtatttttttgcacttttttgactatcatctgttcttcgtcaggtactatctgacttgactttgcttatcgtagaaattaacaaacacatgcgacacttgggattagagcatctcaccactaagtttttttgcagatccaatcttgctaatctaatagtgcacaagcgcttgtgacatcatttaggagagtgtcacaatgacaagtcaaaaatatttcgaagaagcatagaaaaatcgtaagttagttggtggtgccttaaaggcggcacatgttcgaccggactatcatctctatgaagatctgttgcaagaaggtgtaattttgtatgccgagatgttgcgcaaattagatgggcaaaaggttcgcagtgagattgataagcttagcttcaaaaaggttctttggcaaacaatcgatgctctgcgccgagagcaacgcgtatgtgaacgcaatactgcaattgacgaggcttatgacttaggtaaaacagaggcatgggataatcttgtagctttaaaggatgaagttaacaaactaagtcaacttgagcaagtaattctttttgagcatttgcttgagaaaaagacaattacgcagctagttaaagaatgcggtataccgcgtattacgttgaaacgattgaaaaagcagcttttaggtaaattacgtaatgtgatggaacaataagttcattttgtaacaaaatttaatttcataaaaaattttacctactttttgcgtaataagtagtagagggtaattttgctgaagcaataattgaaatgaggtaaaatatgattaaaataaaaagtcgatatccgagaagcactgacgatttggtctttggtcacgtcatgagcaataagaagaattgaatttcagactggtacgcacgttaaagttttcaattctaagggcaataatcatgacctgaaccaaaagataattgacttcttggattacatgaatggaatcatcaatcaccctgaaggttacatcgccagcttgcaaaaggatgtcgaccattacgtgaatagcggaaagtgggtcgaagatatggacaagttggaatatgaaatgaatgaagtcgctaggaaagtaaaaatagaagatgctaagaagctagtcctagtcattaaacgaatgggtggtactaaagacactgccttacaagaactcacaaacaattacggcgatatgcttagccatgatgaaattatcaaactagtacatgaagtttatcagtaaacagtaatcaataatctacagtaaaattatctttcaaaggtgtcgcaacagcgatgccttttttagagcaaaagaaaaagttcccccaattttatgttttataaaaaaaacagtatctatgctaattatggttctcaaattgaaaaatggataatttgatgttggaacaattgatggtattcaagttaaatactgcttgattggttgttagaagagtaaaaaagccatttcagtcacatttttgctgaaatggctttttctattttccatcttttaattatattatcttgaaatgacctcttcttatcctgaagtgtagtctaccaaaaatgtcagagattatttcgttccttctcgtagagtaaattattatcctaaattctattctcgttaatcatgctatcaggcaatataattttcattcgatcatcgaacatattgaagtttacctcagagccttgaatctgataatcataatgaatcaatgcattaactaaaacctctcgaataaccttaaatggtttaaatatttttatattgcacctgtatcataatgataaaaaagttaacgaatgcaactcgttagctctagtcgtagtctaagataactattagcttaatttttaagagcaaaagaaaaacgaggcaattgcctcgttttaaattattttctctttttagtatgtttgacagttttcttatgtgcctttttgtgattcttcttatgagctactttattatgtttcttcttggtaactttcttcttgcttactttaatagtatttccagtaatattacccaaactagtatgacttaatcgaccattcttgaccgcaaaatcaaattcaagattaccttgtgcaagagtactgtgtgcattaacactagcagaaccaataatttcaccattgttattaacaatagtaactgaacgatcagttgaagttggcgtcaaacccattattgttacttgtgcatttaaagtatatttaccattgtttaaaactgcatcgtttgtttcaatttcagtaccagtattattagtcaaatggatgttattaattgaggtagaagcactaattctagtgctgtttgtgtatacacttctatcacgaagatagtgagtgacaacactacttttagttacaactgcagctgcttgaatagtatttggggcagctaccaatgaaactacaggcgatgcagcgaacaaagccgccgctacaatactagtaaatttaaaattctttttcattattatttcctccaaaaaaagacagagctttcgctctgcctttcttatttgtcagcgtataccacagacttaattaaaagtttgaagcctttacgtaagtcttttcagtgttgttaccgatcttgtagtatcgcttaccgttcttgaacttgtaagagccaccgtaggtaacaaccttgtcacccttcttaagaacaaccttattagcacgcttctttgaagtcttgtaaacgtatgcgttgtgcttcaaagtacgttcagtaccatcaatgttgtctgcgttgatgaacttgcctgaaagcttgccgttttcaactacttcgtagtaagccttgccgttgatggtagtggtcttaggtgaaacagttactgagttgtaacgagtcaacttcttgtcagtatcaacatgcttgccgtccttgttgtagtagaaggcgttgtgcataatagtcttgctttggctagcaacagtagtatctggcttagtagcagttaagtctgaactcttaacgaattcgtttgagccttccttgttgatacgagtgtattcaacaccgttaacagttaccttaccgaatgtgtaaacagctgcgccctttgcaagagctggaatattagcagcttctgaaacaacattaccgttaatgttgtaaactttagtattatcagcctttacgtattcttgtggtgccttttcagtaggacccattacaattgcgtaaacagtaagctttgaagtaaagccagctggattagtagcagtaatagttactgggtacaaacctgcaacacttgggttaaccttgcttgagtcaatcttaatattgcttgagttgatcaattgttggtgagcagctaattctgctggagtcttgtcgaagccagtaccataggcactttgtacgtaagctttaacagcaccagttacagcatcgttgttaaatttaccatttacaataactttggtcttgtcagtgtccttaagtactaagttacctgaagttttaccatttgacataacgttgtcattgtagtaaacgttgccgtcaaatacaaatgcaggtgcattgtagtttactgatgcattaattcttacagtaattgtagttgaattaccattttctgacttagcagtcaacttaaggttgaaaccgtttgctggataatcaaagttaccgtttgaagcacgcttcaagccttgagctactaattgactttctacatctgaagcggtagtagtcatattaatagtgtcatttgattgatcactggtcttccaagcatagtgcttttgaatagcattcaaaagatctgatgaactaaagccgttagcaatttcgtttaatgaaacagtgctaccatcgtttacaacagtgttagtatccttgttgtagaagtaaggagtaccttgttggctagcgaacttagcatttaaagtaacttggtaagctttgtcattaacagtgaatgtaacaacttgttggaattcaccatttgagtttgaagcagatgctgacttaacagtaatattcttcatatcttctggcttagcatcctttaatgcatcgccacctaattgtaagatagcatccttttgagcatcgctcaatttgatactgaattgagtatttgaagcacggtcaagaacaatggtgcctcttaatgtaccaaggtcagtaacttcttgagaagaagcaggtgcaacagtgttggtagtggttgcagcagcgttaacagaaacagctgaagcagcgacaggagcaacagctaataaagcagcagcagcagcgctaacaattcttaaatttttcttcatgtggtcttttcctccttgaaatataaaaaatgtaataggccataggttcagcatgtagggagcctataatgtacaaaattcttcaaagcaagatccatgagtttataactctcatgaggtagtagtcattgctgaaggatcagcatgcgtacaggcgacacgcctgaagcacgtatattgtgtactcgatttttttcaagcaatgaaagggtggtttctgtcctcttatttgcttggggtcggttgggtgggttttgtccgctgcgcagatacttttatgaaaaaagagtacgatgcgatttgatgatttagagtgtcatttttggttttgttaagggatgcttgtaaaataataaggtaaagaaaatctaaagaagtaattttgtgaaaaagaaatcgacattttttgcgtacttatatattgtcaaaattaagatatgtaggtgataactatgttaaataaaaaggataaaactaaaattcaagaattaactgataaaacagtggacttgatcgtagaaaatatggggaaatcgcgtaaagaagcggaacaagattttcaaaagtcagatacatatgcgttcttatggctagcgaagcgtaatatcgaaaatgcgcaccctattattttgtacagaatgtttaattctgagttaaaagctaaaccaatagacgaagaacaacaaagttttattgactttatgactgataacacaatcgagttaattacacagaatactaattttggaagataaaaggcaactaaagttttcaaatctacaaaggtatattggatactagttcactcaggacataatttagatgaatcttctcccgaagagctgtttgatatgtttagaaatgaacttagtataggtaatccactaccttcatctatgctgaagttaacttattaaaaaatttatataagttaaataatattattacaaatgttacttttttacgacaaatctgttgaaacgcttgtctagacctaatttgatagatacaatggaggtgttatattaaggaggataattttttatgaagaagagacttttgaccagttttgctgctgccgcaatgcttacttctgtagctgtgccagcagtaaatactacgatgatgaatcaagcctcaagccaacgagtttctgccgctaccgctgatcaaactgcatttttaaacaaggctgccaagcaggcagttaaagcagctaaaaaatatggaactttgccatcagtgatgattgcccaggcaataactgagtcaggctggggaaagtcaggattagccgtgaatgctaataacctttttgggatgaaggctgatgattcttggacaggtgagacttatactgccaagactagagaagaagataaaaacggtaagagctactatattactgctaagtttagaaaatacccatcttttgaacaatcatttgaagataatgggagtaagttgagaaatggtgtttcttgggatccgttgcgttataagggcacttggattgaaaatgcatcaacttatgcagctgcaaccaaggctttgaccggtacgtatgctacagactctaagtatgataaggcattaaatagtcatattactagttctaatttgactaagtatgatccagtaaccgttaatactactagaacttatactgctggcaaggatagttcaacttataattggccaactgctccatctgttgccagtgctattggctctgttaaagctggtgaaaaagtagtagttaccaagactattactttccatgatggttcaagcagaatgtatattgatggtcgcggttgggttaatggctcagttttggacaagagcagttctgcaactaaggaaccagtaactcaggcacctaagaatgtgccagctgtttctaagaacttgatacataatgcctatgtttatgaccaaaatggtaagaagctaaagggcaagatgtacaagaccagtgatgaaaacggtggtaagtggatcaatacttatggtaccaagaccatcaagggtaagacctactaccgtgtcggtgaaaatgaatacattgcagctggtaatattgatggtagcctcagattcttgaagaagaatgcttatgtttacaatcaatatggcaatcgcgataacaatttgaagcacaagaagaatagccaaattgctacttacggcagtgctataactatcaatggtaagaaatactataaggtaggtattcgtcaatacgttaagaaatcgaacttcatgtaattaaggaaagggctttgttgtgaagatacgcaaatttttaattgccttaattgcgcttttggggttagtcggcgtatcatcggtcagtaaccaggtcaaagccgcttcgattaatactttagcgaagaaatatcaatatagtggtgtcacctatttatacaagatgctcaaactagaggggattaagtacaataaattccctggtgttgagtatcaaaatggcaagccagaaggaattgtcgttcatgagactgacgatcccggagctactgctcacgatgaagcaatctactttaaccgcgagtggaaaaatatcaacgcttacgtcaatgcttttgtagatagtaagcaagtcatccaaatgtattcacctaataatggtacttggggcgcaggactgaatgccaacaatcgctttattcaaattgagctttgtgaagaagatagtcgtgatgcctttgctaagtcagttaataatgatgcaatttatattgccaagttgcttcatcgttacaatttaaagccagacaatgcttgcgatgatggtgaaggcacaatttggtcacacaaggcggttagcaccttcttaggtggaacagaccacgttgaccctgatagttattttgccaagtgggattacgacatggatcagttttattctttgatcgagtattactatgacttgcaaaagaagaatgaaaatactgatactaaggatccaaataagattaaggacgaagtaccagcagaagttcaaggtgcggtaactttaggtcacgatgcttatgtttatgacaagaacggcaagaagaccaagatcttgaagttagctggtagtccggtaaccgttttaggctacaagataatcagtaataagaagtactatcaaattggaaagaacgaatacgtagtagctactaatattgatgctactgctagaactgttaagaagaatacatatttgcggactcgttcaggtcgaattgaaaaaggtaatttggtcaagaagggtagtcgggtcatgacatatggcagcaagattacaattaaaggtcaaaagtattatgctttaaatgctacacaatatgttttagttagcgatattaattagaaaaatacgtcttaaaccataaataatgggaattaagacgtattttttgtataattcttgtgttgaatgtgaaaagaggagaatttaatggcgcaattatcattatttttggtcgtcttattagcgctcgtaattccaatatttatggcgcgtttcaaaataagcactgtaccaacggcgattgctgaaattatcgtcggaattattgtaggttcgagcggatttaatatcgtggtttcgatacatgatttaacatttttatcgaacctcggcgtaattttgctgatgtttttatcaggaatggaaattaattttgacctgctacagcgcaagaataatcctaaggctaaatcacaggcgggaaaaactgtcgatccgttgccaacagctttaacagctttcgctggaattgtggtaatggcctttgttttggcatatgttttaaagctgatagggctatttagcaatgttatcttggcagcgattatttttatgaccattgcattgggtgtagttattgctaccttgaaggaaaaggatattcttggccgaccgattggtcagacaattttgttaactgcggttttgggcgaagtaataccgttgctcttattaacgatttatgcctcagttaatggagggaatgctggccagctttggttgattatcttactgtttatcgctgcgattattcttttgcggcggtttaagcaaccgtatttatggtttagcaaagtaactaaggcaacgactcaattggatattcggttagccttcttcttgatttttgctttagttactgtagctgagcgagttggtgctgaaaatattttgggagcattcttggccgggatggtaatgaaattattggaaccaagcgaggcaactaaagataagctaacttcaatcggttatggattctttatcccaatctttttcattatgactggcgtgggcttgaatctaaagtcactatttgctcatccatcatcattgatgttgttgccagttttggtcattttcttgttcttagctaaagctcctgtagtttttctttatatgcgctattttgaaaagaaaaatgcctttgctggtggctttttaactgctactacaattacgattgttttgccaactctacaagttgctagaaaattgcatgcaattacttcaacacaatcagatgcctttatcttagctgcggttattgtttgtatcgtgagtccgattgtctttaattcaaactttgttttatcacctgaggatcggatgaaagaaactgttactattgtgggtgccaatacttttacggtaccagttgcacatgatttgcatgataattggtatacgatcaagatgtttaccgatcagcaggaccaatgcgaaacttatgatagtagggttaaaggtttaacattacttgataatttggataatcaaagcttagagcgtagtggtgcctttgattgcgacattttcgtagctgcagggcatcatgatcaagaaaatgcacgaatggcggaatatgccaaagacttgggagtcaaacgagcaattgcccgaatgaatgaagtcgatagcaatacgatggctcgatgccaggaggcaggagtagagttgttcaactttactaatgtacgttctgctctgatgcgagctttgattgagtctccaacggtctacaagattatgactgatactaacaatgtgttgtactcagttaaggtgagaagtacttcctatactggacgaccacttagggatctggaatttgtggacaagattacggttagtcgaattcggcgtggtgatgagtggttaataccacacggttggactgttattgagccgaatgatatcttgatcttttctggagaatttaaggttgctgatcgagtaaagaagttacttagtcatcaaaattagagataaaaagaggctaaatgcaaaaatcctgcatttaacctcttttttacgtaattaatgattttgtccttcaactgcttcaatgtcgccttgtccatcgcgctcaacaatagccccaattgcagcgattaagcctttaacaatatcggctaatgccattgatggagtgcttggtcttttgacaacttgttctggcaaaaatgggatgtgaatgaagccagctttaaggctagggaattctttagctcgcatgtattgcacttgataaaagatgtggttgcagacgtaagtaccggcagtgttggaaactgtagcaggtagaccaacagcgcgaatcgccttagccattgccttgattggtagttgggtgaagtaagccgtgtcgccatcggcttggataggttcaccgagcggttgataaccatcgttgtcggggatgcgaccatcgttaatattaatagctactcgttctggggttaaagcagcacgcccaccagcttgaccaacattaagtacataatctggtttttcttgcacgatggcatcatgaacaacttgggcagatttattgaaaaccgtaggaatttctaatttgataatttttgcacccttgattgagtcaggtagttttttgactgcttcaatggcggggttgatcttgtcgccaccaaaaggatcaaaaccagttactaaaattttcaatggcttttcctccaaatttaaatcatagaattttttgctttagtcaaaatttgcattgtctctaaagtattgacaaatgcttcatccgctttttgcgtatcgtgttgatcaatcatctgggcaaaagtattaaattcagctgccattcggtgcggatatttatttaaattataacgcttaggttgctcatttctcatttcaactgtgaaattatcaagtgttcccgttgagccgtcaaaatagatactacctttttcaccttcgataaaagaacgtggcgttacatagctatcttttgatgccgtgagggaggcttgtttgtcaggataagagaggtgaagaataccagaagtatcaacgcctttttgcatgttggcataatattgcacttgatcaggcaagccaaacaatgccgagacaagatgaatgttgtagatatttaaatccattaaagcaccgccatcttttttaggatcaaaaaccggcgcaattttgccttcaagaaaggcgtcatagcggctagaatattgcgtataatttaggttaacaatatgaattggtgcgatcttgttcaattctttttggatttgtttgaagttttctaaataaaggttagtaattgcttcaacgatgatcaaacccttttcgtcggctaacttttttaattcttttgcttgagtggtgctctgaacaaatggcttttcacagattacatttttatcgtgttctagagcagctttagcaatctcataatgcaagaagtttggcaccgctacataaactgtatcgacttcagaatcagccattaattcttcattgtccgtataagtacgtttgatgttgtactttttagctaattcccgggcaatattttcactgcgcttagttgaggaaatagccgttacagtcatattcgcaacttgatcagcggttgttaaaaagtcatggacgatcatgccgctgccaataattcctaatttcatttttttgcctacttctttttagtattagtggttggtaaatctttagcgttagttgcagagtctggtactcttaagaagtcatggctgccgaagttgccataactttgaccaactttaacgtacattaatttacctagtttcatattaacaaagacattaaaggtagataatttattacctttaattacagccttaacattcattgattggtacttgcctaattttttaatttggctgaaaattttagcttgatttgtactttgagcagtagtgtcaaaaattggtgctgctgcctttttcatcaaagcttggtcagtacttttagcagttaaagtataagtgtaaacaccatcttttttgctttttttcattttataagcagaaaccaacttatcacttggattggtgatcatgtggttattcatgatggcatcggttaagtcggcataattatgaccggttagtttttcaaggtcagccttgtaccaagtatcttgtccattaatgtagacattgttaaggttgacccattcctcagtagaactagttttacctttgctagtggtttgattggtgatgtggtaaacagtggttttaccaccaaaggtagtgttagctaaggcaacttgattagaagtgtcggtacccagagtaacagattgaataacctgtcccgacttgaagctacttttagctttttgtacaacttgagtcttagtcagagctgaagtagccttcttctcttgtttactgcagccacctaataaaaagaggacagcaaaggataaaccgataatcgttttcttaagtttcatttttttctcctctatgcttcaataagtctattataactaaaaagtccgttgctcgttggagttacggactattcttttactttattttgtattaattttgcctaaatctacggccgatttcttgatagaagcaggtaccgtcaactttttgacttgattaatttgatcaatctgcatggtgaaattctttttgtgtccttcatccttataagtagaagtcacattaacatttttgatgtcgtaattctgatctacgttaattttgatttcgttgctgattggtttaacatcatcaagatcgatgccgattaaagcagtaaaggcagaatcagatacaattgcgttccaaatttttttgttatttcctttataagtaagcagataatcattgccgttttgctttaccttaaaatattttgcgttagggatgaaaggcatgagtaatgtgccgttcaaattgtcggtaatggcaccataggcactagccttagacaactttgtcttaaaccaacgctgagaattggtacctttcatttggatatagttgcttttaccctcaatccacattttatagtgattagagctgctagaaacattagcataaataatcgttggctttttagtatattgggcttcggctttttgcaaagacttgccattgcttaattcattccaagtagcgtgcattgaactgaatttcgttttttctgcactggttaaaatcgtcttggcagtaggtaaattagctgtcttttttgaacctgtcttagagcaggccgttaaaaagagtaatgctaataaaacggtaatgataatattttgatgtttaaatttcatacataactttctttcattaaattttttcttctagtatagcaagaataacgttacaaaattgaaaaaacacgatttttttagtcttaactctatgaaaaaatttgtgaaatgtgtaaaatatggatgaaacattgaattttaaaaggagatatttcatgtcaaaattagttttaatccgtcacggtcaaagtgaatggaacctttcaaaccaatttactggttgggttgacgttaacctttcagaaaaaggtgttgaagaagctaagaaggctggccgtttaatcaaggaacacggtcttgaatttgaccaagcttacacttcattattaactcgtgctatcaagactttgcactttgcacttgaagaaagtggccaactttggattccagaaactaagacctggagacttaacgaacgtcactacggtgctttacaaggtttgaacaagaaggctactgctgaaaagtacggcgatgaacaagttcacatttggcgtcgttcatacgatgttttgccaccagctattgatgatgacaacgaattcagtcaagcacatgaccgtcgttacgcaaacttggacccacacatcgttcctaaggctgaaaacttacacgtatgtcttgatcgtgtaatgccattctgggaagaccacattgctccagatttacttgacggcaagaacgtaattatcgcagctcacggtaactcacttcgtgctttgactaagtacatcgaaaacatttctgatgaagacattatgaacttggaaatgaagaccggtgaaccagttgtttacacattcgacgaaaacttggatgttgttaacaaggaaaagttggacgactaatttattaagtagttattcacacaaatagaacttcggcgtaagtcggagtttttttatacaccaaaaaaggcatcaccgttaagggatgccttctttgtatcaacttgctccaaaaactataattatttctttgatttcataatttttttggaacaacttcattatattataaataaagaaagatcgccatttttttctaagaaagtggtgaaaattgacagttgaatacgcgtggtgctagttaaatcgttctagacaatatgccatattataagctaaaatagctatttctagccgttgttgaaaacctactaagctcctggctcgattattctcagcattgtaatagctaagcaaagaaaagtcgctttcgattgttcttctaattgccattaactgatgatcattatgctttttagcacccctcatgtttttacgatatggtgtccaaagcacgtatcccatacgctttagcttggctgctaagtcttttcctaaatagccttcatctcctaaaagataatggttaattggatgagcattgatcatcaattctaccgtctcttttgcatcatgtaccgacgccttagtaactgcgtagtcaagcagatagccatcatcactcactattgcgtggactttgaagccataatagtagatttttttcgtcgctttataaccaatatcggctatgccacggaagatcttaacgtgataattgcgaacaggctgacaaactggaatcggaaaactgtcgataatcaataattctccacctacctttacttcctgattccaaccctgacggatacaacgaattagaggcaagagcattcgagctcgacggttaaaacgagaatgagataagccaacgaagaatttacagaatcttcgttgagattcaattccaatttcagtttgccaaatgagcatcgctaagatagaactatcaggaagcttggtctgatcaacatttttacgatgtttaagtccatcaggcgcataaagcttatacagcgagcgacaaatcacatttaaccgattaaaactaacttgtaaatggtgagaaaaacgattaagcttgagatagttcaattagatcagactcttttctatttaaattacttacaacttgagtctagtctaattggacttttttattaactaaaacgatttaactagcaccacgcgtagttgaatatgataagtgctattttgagttacaggagtgtagaaattgggagaaaaatatgcaaacaatcgataattctctctttcaagtctctgtcgatgagaatggggcccggatggcacatctggtgtctttaacagatcaatttgattatctcggcgagcaagaaagtgaagaaggtatggcacttgcttttccagtaatggatcaagccgataatttggctaacaagttgccttggaccgttgttgacaaaggtgatactcgcgtaagtctaactttaattgatacgccggagagctataagagttttccatatcattttgaagtaatgactacttatgctttggagggtaatcaagtcaatatatccttttatttaaaaaattcttcaaataaggaactgccattttctttgggctttatcttaccaacttcttggcaaagtgaaagccaggtcaataagattagtttgactggcaaagaacatggcattgatcttacttcaactgattttaagttgagtgcaaaagaaggaagcgttacagcttttacggataaaattgaattagaggcaaaaagtagccgtaattttgcgttaagcttgactttgaagtaaaaattagtaacgattttaataagatatactaagcaagtcagcgatgatttgctttttttgttataatacattcaatgtgaatttacatcataataggtatattttatgaaagatagaaaacaaagatctaatcacccgcataatagtcgggtagacacacacagttataaaaatcgtcatatttgggtctgggttattagtatcgtagccttgcttgcggttgctggagcggcgtactttgcatcagtttatttccgtactaagtcagcggttgataagacctatgatcctaagactgcagtgaaaactacaggtgaatttgatggaaagaagaagttcgctgttttactgatggggactgatacaggtgcccttgatcgaactgaaaagcgcggccggactgataccatgattttagctgtagttaaccctgctaagaagcgttacacattggtctcaataccgcgtgatacgatggcacagatggttggaagcgagagcttcaagacagaaaagattaacgccgcttatgaattaggcggggctaggatgtcaatggattcagtttctaagttaatcaatgtgccaatcaagtattatgccgtggttaacatgggtggaatcatgaagatgattcgctatgttggcggaattaatattagaccaacgcttagctttgaatatggcggttatatttttaaaaagggcaagctgacccatatgggtggtgcaggtgcgctagcatattctagaatgcgttatgatgatccacgtggagattatggtcgtcaagaacgacaacgacaggtaattaccactttgatcaagaaggcagtttcaattagttcattatcaaatctggattcaattttgacttctgtgtcaagcaatgttcggactaacttgccatttagtgcgatgcaacagattgcgatgaattatcgtagttgtgccaattcgtcatctagtgattatctacatggttacaatgcaatgatcgacgatgcggcttatcaagtacagccaactagtgaattgcaacggatttctaacctggtgcgcaaagaattaggtttacctaaggaaatgatttcaaataatgaaactttccaaaacgaaaagaatattgcaaatggctttagctttaagagcgaaaaaacgcagcactatcatatctatgattacaccgaagaaggtgataattaatggcgcgcatttgggctactctgattggctacgtttttggaaatttcttaacggcgatgatcgttggcaaaatctttttaaaaataaatcctactgaatacggttcacataatccaggaacggctaacatgggtgctgtttttggtaaaaaatggggtattttaacctgtttaggcgatttgcttaaaagtttaattgccttgtttattgtatattttgcttttccagctcatattaatattgcttatacagggctaggcctgatcttaggacattgttttccaatctgggatcattttcgaggtggcaaaggagttgcggttgcagctcaggtagcagttttttataattggaaagctggctttgctactttattagtggctttggtattaacagcaattatgcaaaatttgacgattccgcctttagtgtttatgcttttattcagtataaatacattcttgcataatcaagaagcaggatttgtttttatcgtgattactttgatcatgtgctttaagttctggcatgatatcgtagactttttcaccggtcatggcaaaaaggttgatattctgctttcaattaaaaagaagctagggatcattaagtaatgacagaaatttttagtgaggacacagactagagaaaatgagtgagattaacaagaaaaaatcactaaatgctcttcaaatcatttgtttgattgtcgcagcattctttatgctagtgcagatgtattcttggggtagcaattttggtagattaccattaagtaccctaatgagatttattccaggactacttggtcacagtacgatggtactagtaccaatggtctttggtgctgtttatagcaaaagaaaagttcatccaactgaagcctttaagttttggattatagcggttgttacactagtgcttttatacttggtgaacttctttaaacgaccaggtacctttaatatgtggaagctctggggagtatttttcccagttttgactagtacatcagtattgttggctggcttgatttttagtatgctagttcaaccatacttgtatgaattacaacatcgcattactactaagcaaaatgtattattgcttagcgcattaactttgactggttttgcgactagtgcaggtacaatgatctttaacaagtcaatttatggcatttatttgatcttgtactttgcttgggggatgtttttagctaacgttaaaattcctaaaaaggtctttggctggtcaattgcagctggagtaatgtctttcttcgtaatgtttatcggtattcccggatttaatggggtttactggtaccaacgattatctggtcgaagtggcgtttattcctggaatcctaaatttttaagtaatattgcttcaccatttttgttcttaatggttttagcagccttcttaatctttagaaaagtgattgttagctatagtgctaagcagatgcacttctttattccagtaattatttttatggacgctccaattattggtggttttgttaaatcgttccgctttaccaatagcgctggatttaacaagttcttgatgattgtcatcatgatgctagctgcctggggcttaagctggctatatgagcgctatttattcaaggtgaagccggttaaacggacggttgcttttttcaagcaacataataacttagcagaaattgttgaagatgcttggactaacttcactgcttggatagttgaaaatcgagtacgactacttacatggggctggttctatgtattaagttttgcttcattcttaattgaatcagataatctgcggatccaaattacgactgcaactgatatcaatgccgtaattttcttgctcgggactagattcttcgctattattttgacagcaatcttccttgatgcaatgtttgcaattttctacttcattactacgcgttactggacttcaacagttttagtaactgtaattacaattggttgggctattgccaacaagattaaattagatcttcgtggggaaccaatttatccaactgaattagacgaaattgttaactggaagaccttgatgccaatggtcggccaacaaaagataattatgatcgctattgccttagtaattatcattgcattgactgtctttcttgcaattaagtttccaattaagaaaaagggctcatggaaacgccgtggtatttgggcattgttgagtttgcttttgttcatgacaccagtgcgctttaaccacgatggcggaattatttatcacattaaccgtggctttgataataagcaatcgtttagaaaccctgaacgtgatattcaaattaacggtccattattgaacttcttgaattactttgacctgcagattatgaataagccaactaactattcaaaatctacaattcaacatttgaatgagaagtacagcaagatcgctaatgaaattaacaaaacaagaaagaatactctaaagaatcaaactattgtttacaacttgagtgaaagttttgttgatccatatactttcccaactgtaaagatcgatcctaaggtgccaaatccagttaaatttattcaatcaatggctaagagatctacttacggtagcatgcttagtgcaggttatggtggtggtactgccaacatggaatgggaaactttgaccggtttcaacatgggaatgttcaagtcaaccttgacgccatatgttcaaattgtgccaaaccatgatttctatccaacggtcggaatggacttcaattataagtctgcagttcacccattcattggtacttactactcaagagtagaagactataagagatttaagtttaataagtttgtttaccttggctctaaatataagatcattgatcaaaagaaacttggtaaatcaacttataattctgattacactacttatgcaaatggtttgaaacaaatcaatagcatgaagggtggtcaattcattaatttgatttcaattcagaaccacatgccttacaacaattggtatccaaacaatgaatacatgggcaaggtatctggtgaactcttcaacactgctgctattcgtgaacaaatggcaacttacatgaagggtgttcaatacactgataaggctgtaaagcaatttatcggtaagattgataagatcaagaagccaatcacagttgtcttctatggggaccactacccaagtatcttgtcacaaaactacgctagtcgttatccagtgcaaatgcactcaactcgctacttcatttattctaacaagtatgctagagaacatggtgctaagagcaagttgactcacaactctaattacgtcaacactagtgactttactgcaatgatgcttgaacaaactaattctaaggtaactccttaccaagcattgttaacagaagttcacaagaagttgccagcaatcacgattaacttcaatggtgatcaaggcttccaattagttgaccaaaaggggcacttcgttgatccaaagaaattgacttcagaacaacaagcaattttgaaggattacgaaatggtgcaatatgatatgactgctggtcaagcttatggcttaaaagctaagggcttttacaagatcggtgactaaataaaagagatcgaacgtaaagttcggtcttttttctacgtaaagtcaagcgcaataaggtgtttggctttattttttacctaaattttgtcatgagtatcttttagtggcgatttatttttttagaaagcatactaaataagcccacctctatatttaatttatgggcttagcgttataatgtacttgatcaattaattacaactaaagtctttttggttatgtgtggctacgttgtaatcatatagttgatcattgataatcagagcataaatggttctgattagtttatgaattgaagcaatagctatctttttgaaccctttggtttgagaggatagctttttgctttcataataatctgctatatgacacggatttgtcttagctgcattatcaatttgtccaatagctcgataaagcaacttacgtgcgactgcattgccatgtttagtaatacttaaattagagtccatttctcctgactgatatctgcctggatcaattccgataaaagcattgattttattaggattactaaatctgcgtaaatctcctaactctgctaaaactctgacagcagtggtctgtgcaaagcctggaatgctttctaggttttctaaatcatgattaggcaaagacttcgctaacttaaccattcttgcgattaaattttctctttgatcacttaaattaagcaatctgtgtgcataatactgcacttgctcgacttctatgctagagcaagatacaactggataagcttgataagctaattcaattaatttatctgcagtccttagagcgtgtttaaaagcaatcccctttaagctcattaaccagttaataagctgttttttatcttctcttcttactaagtcacaatgaggatatcgcacaactatttgccagtaatttttacctttagcagaagaaaatagattttcaatttcagggaaagtcgattgtagagcttggtgaagtcgatttttagccattactaagtcagctgttaactggtcatagaagcggctcaaagcattaagctgcttataagtttgagattgaagttgattaattggatgatgatatagtctttgaattaaggccaaatgataagcatcagttttatcagtcttattatgacgtagtcccatatccatttcttttttagctttaagaggattaagaattacataatcatagccatagtcttccagaaaagattgcagtgtacgtgaataaacaccggtagcttcaaaaataatttgcggatgtttagaaaaagcggttaattcatgaagcaattgaataaaaccaggacgattattagtaatggttagttcatttttgctttcaccaattagttcacaaacagtagaagtagacttgcttacatcaattccaaaagtaacttgcataataaaaacctccaaaacttagtagtaaaacgtatttacttaagaaatcagatctaattttctaaactcgacatctagtgtccacattcttcgaagagactattgaaaacttaagtaaaactgccagtttattatgcgacatcaagtgtctaaagacctcagggcatatcgttttactactactttaattctacaaaagaataaaaatagtgaatcaattatcccgtcggataactaattcactatttagcttagaatgttttgtatccaatgataaaataagggctaagaggaataactgataattagctgatttaaaggtgattagaatgaaaaagataataacaatggcactagccagtgctgcactatttggatcttctgcaacaactgttcaagctgggacatataatcctaagaacattaccagttttaatattaataggcgtaactatgtagctaagggaaagatttataaactccatttacccgcagctggtagattagttactaatggcaatgttactttaaaaaatagtatggaatggacctgtattccttatggtaaggacaaaaatacgtattatctgcgtaaaggcacatattatttaactagttcaaagaatattagtgtgaagactacttatactcgtttaactaagatccgtaagaatttagaaacttacgttgaaacaaagaagaataatgacaacagtagtcttaaagctagaaagattgaaattggtcaagatattaaagcaatgggtgaagtgtacgattacgatagtgtcgactactacacatttactattgactcacctcaaatggttacgatgaggatgaccaataatccgatttatcagcttggaaaaggtaacattttcagcaagatgaatgtaatcatgttcagtgaaaataatccagttggcggtagtacgatgctttacccagagagtttcgaaattaatggcaataagattgctagtcaaagctggtacttgtctaaaggaaattatacttttagtgtaaatactcgtggactttataattttcaattaacggctgttcctgatacgcgtgtggtaccggcagatactgagatagaatctttacaaaacactaaggatggtgtggttgctaacttaagggatgcacgtcatgcgaagacttatgaacttgcatggcgtgaaaaaggctcaaaggcagctccattcacttctagtagcaatactacagaagtaagtactgcacctgctacacgttacatagacaaaaatgatcgtaaaatcccagtttcaattggtaaaaaattagttaatggtcaaagctactattttgtagctcgcggtgtaagcaatcctgattacattcgttacggcaatccggaaaaagataattattttggtgcttggagtaattcagtagaacacacttactatgcaccttcagatgcaacaccaggtgcagttgatttaaccactgctaaagctgacagtacttatcacaacattcatgtggcttggaataaaattgctagtgcacaaagttatcgcattgcctaccgccaaaaaggtacaaataagtggtactatgaagtaactgatcaggctactaacgcgattactggtattactagaaatagaaattatgaagtgaaattgcaagcattgaatggtgaaaaaactggtccatggtccgcaattaaaacaatttttgtaaaatagcggttgactaaaactatttttctcgttaatatcataactaacaaatgagtagcgagtcggctcagcgttcagagaactagcggttggtgtgagctagacaggccgatttcagcgaagtacttaatagggttgctcctttaccggcttgaataaggcgcagcagcgcaaacgtgggtggtaccacggctaataatgtaatttagtcgtcccttggtcttttgaccaggggacgttttttattggaggaaaaactatggcaaaatttgatattttggaagatttaaaatggcgtggtgccattaatcaagaaactgatgaggaaggtttgagaaagtacttagcagaacatgacgattgggcattgtactgtggtactgacccaactggtgattcccttcatattggacaccttattccattcatgatcttgaagagattccaaatggcgggctaccatccagtaattttaattggtggtgttactggtgcgattggtgacccatcaggccgtaagactgaacgtactttacaaactgcggaacaagttaagcacaatgaagaaagcttaactaatcaaatgaagaagttatttggtactgaaaattttgaaattagaaacaatgctgaatggctaagcaagcttaacttgatcgacttcttgcgtgattatggcaagttattccaagttaacaatatgattaacaaggatgttgtagctagccgtcttgaaaatggtatttcatttactgaatttacttatcaaattttgcaagcaattgatttctaccacttgaataaagatgatggtgttcaacttcaaattggtggtagtgatcaatggggtaacattactgctggtattgatttaatccataagcttgaaggcgcagatcgtccagcctttggtttaactattccattgatgcttaaggctgatggtactaagtttggtaaatctgctggtggtgctgtttggcttgatccagaaaagactagtccttatgaattttaccaattctggattaatcaagatgaccgtgatgtggttaaatacttgaagtacttcactttccttagccgtgaagaaatcgaagatttagctgaaaagactgagaaagaaccttggaaacgtgctgcacaaaagaagctggctgaagaagttaccaagtttgttcatggcgaagcaggtcttgaagaagctaaaatgattactgatgccttgttctcgggcaatatcaagaacttatcagttgctcaaattgaacaaggcttgaagaatgctccaagtgcggaagctggcaatgaaaagaagaatattgttgatttcttagttgacactaagattgaaccttctaaacgtcaagctcgtgaagatgtaaagaatggtgccatttatgttaatggcgatcgtgagcaaagtactgatttcgaagttgatccatcaagtgactttgatggtaagtacgttattattcgtaaaggaaagagaaagtatactttagttacaattaaataattaaatatatgattttaacattttatatataaaaatagagggattttttcctctatttttttagctaataatcggagatatttactaccaactaatatttgtaaaagataaagataatgatttgtgtaaaataatattttacttcttaaattgttattttattttctaaaatcaattgctacaatctatttattaagttattcacaaattcacattattactatacaatttgttatttcaagtgtaataccaatataaaatagctgcgtataccttttgcaaatgctgatgcaaagcactctattaaaaactgactcttaataaaaatatgtgaaaagcagcactatctgctttacttctaatcaaacagtgttatagtaatagtgtaaagagaaagtaagtaaatagaaagaggttattaaaatgttagaatctaagaaagctattaagattatttcaagtttggtaatcggtttgagtttaggctgtgttcttactcctattgctcaagctacttcatttactgctcctaaattgggtactgcaacacaagctccaaccaatcctgctattaaaaagggtgataagatctttgttgttattaaagacaccaaaaatcaaaaagtagctgtttacaataaaaatgctgaaaaaactagcaaaaaagttgcaatgggttctacttataccgcaaaagacgttaagaaggttaataaaaagaagattgttagaatcaacaagagtcaatggttgaatactaaagacgtcgttaagaactaaataaaagcaaatttaataaccgttttgaatacttattttctaaaaatacttggagagaataaataaggacgaggatgttcaaatgaatgtcttcgccttttttggtataatgaagacgccgctttagctcaataggtagagcaccgccgtggtaaggaggaggtccccagttcaaacctgggaagcggcttagttgttgtttttggcaagaaaggaaaaattttatgaagcatgaacttacaatgaatgaaattgctaaatttcaaaaagaatatgagcaaaaaccacaaaatcgggttgcggaattggctgttgttaataatggtgtggctaaggctagtttggattcagaaaaggttaggaaattgaaccgcactttttcaattgaaatcccaactgataatgttactgatcaaaagcaatcgggtcgctgctggctatttgcggccttgaatacattgcgtcatggttttgctaagaagtataatgctaaaaactttactttttcacaaaattatttattcttctgggatcgaattgaacgagcaaatattttctttgataatattttgaataccgcagatcgtccacttagtgacagaacagtgcatacttatatgcagggacctgatactgatggtggccaatgggctatggctgtttctttgattaggaagtacggcttagtgccaacctatgctcaagatgaaagtttcactgccaacaatactgctttcttcaatcgtattttgaataataagttgcgagaagatggacttgtgttgcgtaagttagctcaagcaggtaaaaatgatgaaattgaagctaaacgtcaagaatttttgagtgaggtttaccgtatggcagtaattgctttcggtcaaccagtacaaaaatttgaccttgagtttaaggatgatgaaggtaagtatcattttgatggtgatcttactccacttgatttctttcacgactactttactgatgacttggatgactatattgttttgttcaatgcaccagatcatgaatttgataagctgtatgctttgccatttgaagacaatgtagagggcggaagtccagttcatttcttaaacactaaaattgaaaatcttaaagaagctgcgattaagcaacttgaagcaggcgaaactttttggtttggttgtgatgtaggtaaagatagcgatcgtcaaaagggaattttagctcataacctctatcaaactgatgctatttttaatattgaaactaagttaagcaaaaaagagagactggaaactggtgcttcgggttcaactcatgccatgacgatggttggtgtggatgttgttaatggaaagccacgtcaatggaaaattgaaaactcatggggaaacaaggtcggtgaaaaaggctactttgtgatggatgataactggtttgatgaatatctcttcaaagtagttgttaaaaaacaatatgtaccggaaaaactggttaagatttgggaaggcaaagcaacgccggtaaaagcatgggactcaatggcataatggaaattaaacaagttatcgattttactcaaacacacttaaagaatgaaaaaacgggtcatgatttttatcatggcgaacgtgtagctaatttggctagtcaaatgtatttagcagatcatgctgatgctcatgaagatagccgggtagttgctattattaaaacagcgggttatttgcatgacacgattgatgaaaaaatatgtgctgacccacaaaaggtaattgatgaaattaaagttttattgccgcaagtagggtttaatgaactggaggcatgggatattttattcaccattcaacacatgtcattttcagctaatattgagcatcactatcatttgcctttatctggacaatatgtgcaagatgctgatcgtctagaaagtttgggtgcgattggaattgcccgtgcctttacgtatggtggtaaacatggcaataagatttacgatccagagattaagccagccgttttaactagtcatgatcaatatcgtaaccatgtcgaaaccacaatcaaccacttttatgagaaactttttcatttagaagatttaatgaatactcctgctgccaaaaaagaagcggaaagacgaactgcatacatgcgcgactttgtacgtgaatttatgcaagaatggaatgtttagaataatttaattttgaataagccttgatacatcagcattgaggcttattttttaaataaattaaaaataatattaaaaaaaacttgcaaagcaaaaaatatttagctatacttataaacaacttaaagagttctattaattttctcataaacgaggggagcaataatatgaagtttaccaagttattcgctgcaggagcaaccgttttgattgctggctcaacattagcagcatgtggtagtaattctaattcgtcaagttcatcagctaagaaaacaattaattggatggattcggctgaaattccaacgatggacatttctaaggcaacagacgttaccagttttaaccaattgggtaacgttgaagaaggtttataccgtttaggtaagaattctaaagttgagaatgctttggcaacagataccaaggtgtcaaaagatggtaagacctggactttcaccttgcgtgattctaagtggtctaatggtgataagttaacggctaaagactttgtttactcatggcgcagaaccgttaatccaaagacggcttcacaatatgcttacctcttcgaaggaattcataatgccactcagatttctgcaggtaaggcaccagttaatagtttgggagtaaaggctgaaggtgataataagttagttgttaccttagacaaacgaattccatactttaaattattgatgggattcccattgttcttcccacaaaaccaaaaggtggttgaagctaatggctctaagtatggtacttcatctaagactacagccttcaacggaccttttgtacaaaagggctggactggttctaacctttcttggaagcttgtgaaaaacaagaattactgggacaagaagaatgttaagcttgatgctattaattacagcgtgcaaaagacaccatcaacagcttacaacttgtaccaatcaaataagcttgatgctactattttagattcacaacaaactaagaacttaaaacatcaaaagggttacactttgcgtgatactgcagcaaccttctatttgcaatttaaccaaaagaagaagattttcaaaaatgccgacttgcgtagagcaatctcaatgtcaatcaatagaaaggcactgggaagtgctttaggtggcgctaataccccagcaaccagtttaacttcaaagggtgtagttaaccatgatggtaaggactggtcagaagttgttggtgataagaagaacgccgcatataacccaactgaagctaagaaactttacaagaaggctttgaaggaattaggcgttaagaacgtttcatttacaatcctgtctgatgatactgattcaggtcaaaagacgactgaaacacttcaaagtcaattagaagaaaacttgaagggcatgaaggtttcagtagctaacgtaccattcaagactcgtttgaaccgttcaactagtggtaacttcgatgttgttgtttcaggttggtcagctgactttgccgatccaatttcattcgttgacttgtttactagcaagaatgcacaaaataacggtaagtggagtaactcccaatacgacaagttgatcgctgattctaagactacagcagatacaactaagcgttgggatgaccttgaaaaagcagaaaagatcttgcttagcgatgaaggaatcgccccactttactacaagactgaagcttggttagttcgtccagacattaagggcattgtctacaatggcgctggcttaaactacaacttcaagaatacttatgtagcaaattaattaaaaaatcaggaggacatagtaatgattattatttcagcaattattattttacaaacaagacataaaaataatctctcttcacttgtaattgcgtaataatagtctagctatgatttgatgaatagatagaaggagcaaccatgtgaaggttgctcctttttgtaataaaaaagaatgagggtcaaaatgaaaaagtggaaaaagtattttagtgcaagtttattaaccgtcgtatcagctgcaactttggcagcctgttcaaataaaagttcgtcatctggtaccaagcaaaccttgaattggatgactaaatcagaattacaaactttagatttgtccaaggtgactgatgcaactagtttagatcaaattaataattcgatggaaggactctatcgtttaggtaaaaattccaaggtggaaaatgctttggcaactaagactgaggtatcaaaggatggtaaagtgtggcattttactttgagaaagaatgccaaatggtctaatggtgatccagttactgctaaagatttcgtctattcatggcgtaggactgttgatccaaagactgcctcacaatatgcttatcttttctcaggagtaaagaatgcggatgatgtagtagcaggaaagaagaaggttgaaacactcggtgttaaagcagatgataaccaacatttaaccgttactttggatagaagaattccatactttaagctattgatgggcttcggggttttcttccctcaaaatgaacatgccgttgaaaagtatggcaaaaattatggtacctcatctaaaacaatggtttataacggaccatttgtatcaaaaggctggaccggttcaaacttgtcttggaagctagttaaaaataaagattactgggacaaaggcaaggtaaaactaagtaagattaattacagcgtgcaaaagacaccatcaactgactataacttgtatcaatctggaaaattagatgtagcattattggcaccacaagctacaaaacaattgaagaaccagagtggttatacaattagaccagcttcttcaacacaatatttacaattaaacgaaaagaacaagcttttccaaaatactgacttccgccgagcattatcgttatcggttaatcgtaaggcattagcttcagctgtaggtggtgctaacaagccagtcactaccttttcaccaaatagtatgactgaagtaaatggcaaagattatactgaattagtcaaaactgctgaaactgataagttaatgacatataaccctactttagctaaaagttattggaagaaagcacaaaaggctttaggacagagcaaagttaacttcactttgctaacctatgacgatgatgatgccaaaaaagcaggtgaatacttgcaaagtactattgagtcaaacttgaaaggcgttaatgtcagagtaaatagtttacctaaaaagactgccttagttcgtggtcaaaatggtaactttgatgctttactgatgggttggcaagctgactttactgatccaatctcattccttgacttgaacacctcaaatgcttcatacaactggggcaagtgggctaataaggaatatgataagtatgtagcagcttctaaaactactggaaacgaaaatactcgttttgaagacttagctaaggctgaacgtgtattgttaactgagcaaggtgtagtaccactttaccagccagcagaagcttggatggttcgtccaactgtcaagggcgttgtatataatggtgctggagctaactataacttcaaatatgcttatgttgaaaagtagactaaaatcctaaatatctaaataatagaacttataacaataaacaactcctctatgtaattaaaaagcagaccgaaaaaatccaatgtcattaagttaagacattgacaattaagggtgcttttttagagatcgaatcatttggattcgatctctttttttgtataaaataaaggcgaaaagaccagccttttcgcctatcttatatattatatattttaaaccttcaaaattattgccagaaagatggtgttaattatgaaagcccttcataagaatattctagaacgtcttgatcaaattatcaataatactggggatcatattcacgattttattaataatcctcatgcttttaccaggaaacgcactttagatgcagcgacagtccttaaaactacaattaacatgcaaggtcagaatttaaacagtgaactctttagagcttttggcgaagatgcaactaaaaagaacgataaagtagttagtacttctgcctatgttcaacgcaaaagccagctttctcctgcttgttttaaacatattctgactgtttttaatcaaaatctatttaatattcaactttttgatcatcactaccgtttgtttgccattgatggctctgactttaatcaaatctggaatccgaaatcgaataacattgtacaagcttcttctcataaaaagaaaccctattgtcaaattcacgttaatgccttatatgatctattgaataatacctaccaggattgtatttttcagcctaaatcagaaatggatgaacgcaaagcggctgttcaaatgcttaaagctttgaattgtggtccatatattgtaacaatggatcgtggctacactagtttcaatatgattgaaaactgcaatcgcctgcctaactgtcattacataatacgaactaaggctggacaaggcggagttaaagaaataacgacattgcctgatcaagaatgtgatcgtgagatttcctgcctggtaactacttctaactattactacatcacgcataaagccagtgagaatattcaccatgtccagcatcattatcgccaatatattaagtatcgctctaaaaatacccaggatctaagctgggattttggcgagttatgcacaataaaatttcgagcctgcaaatttagaattaatgatgccaaatcaggcaaagaagaatgggaagttgtgctaaccaatcttgatcgaaaaaattatccgctaaaaagaattaaagagctttatcatctgcgttggggtattgagacctccttcaagaaattgaagtattctttaggcagtgtacagttccattccaaacaagataaatttattgaaatggaaatttatgcccatatgattatgtttaatgcaatcagtcaaattgatgcacaggcctatattccgcaaaagcattgcaagtatcaatatgccatcaatttcaagcaatcatgcttgattattcagagcatgtatttggcttcttctttaacgcaagattttgaacggatccttattcagatcagctattataccattccaattagaccaggccgcaaggacaagagaaatattaagcccaaatcagctgtatattatttatatcgcgtagcttaaaaaagcagaatctgtgctatgccttatttgttgtacgaaaaaagcaccaatttaaccaattaaatgttaaatcagtgctttaaaagtctaatattaattgtcaatgtcttaacttaatgacattggaaaaaatcggtctgctttttgattttcgcttgaaaaaagcaagttaggctagtaaagtaaaactaataattttttgaatgagaaaaggagagcttaaatgtcaaattgggatacaaaattcgctaaaaaaggtttaacgtttgatgatgttttattaattccagcagaaagtcatgttttgccaaacgaagttgatttgagtacgactttggcggataacattaaattaaatattccattgatcagtgcagggatggatactgtaactgaaggtgcaatggcaattgcaatggctctccaaggtgggctaggcgttgtgcacaagaatatgtcaattcaagcgcaagctggtgaagtagccaacgtaaagagcgtagttgtgccaactagtgctgcaaaggccgcaactgatgatcaaaaccatctgctctgtgctgcagcagttggtgtaaccagtgatacttttgaaagagcagaagcattgcttgaagctggtgctgatgcgatcgttatcgatactgctcatggtcactcagctggggtattgcgcaagatcaaagaaatccgcgatcattttccagaagcaactttgattgctggtaatgttgcgactggggatgcaactagagcactgtttgatgctggtgttgatgtcgtcaaagttggtattggccctggatcaatttgtactactagagttgttgctggtgttggtgtgccacaaatcacggctatttatgatgctgctacagctgcacgtgaatatcacaagccaatcattgcagatggtggaattaaatattcaggtgatgttgttaaagctttagcagcgggtggcaatgctgtcatgcttggctcaatgctatcaggtactactgaagcacctggcgaaatttttgaagataatggcaagaagtataagcgctatcgcggaatggggtctgttggtgcgatggcccaagcacacggttcaagtgaccgttacttccaaggtggcgtaaacgaagctaataaacttgttccagaaggtgttgaagctcgagtagaatataagggcgatgtttctgatgtagtctttcaaattgatggtggtctccgttcaggtatgggatattgtggtgctgcaaatattccggaattaattgataaagctcaatttgttcaaatcactaatgcaggtttacgtgaatcacatccacatgatgttcaaatgaccaaagctgctccaaactatacaaaatagatataataaaagttaaaaataagagagaaagcaaaatttctctcttatttttttaattttttggacattttaactagatatatttatttcttttggtataattaaaacaacattaaaaagtaaatgaaagcataaaataaaatgagggagcaattaatatgactagatacctattaaaacgtatattttatatgatcctcactttgcttatcgtggctacggtaacttttttcttaatgaaattgatgccgggttcaccttatgctaatgaagcaaagatgacgctaactcagcggcaaattatggatcaacagtatggtttaaataaacctatctggcaacaatatttgatttatattgcggggatgcttcacggtgattttgggacatccttccaatatagtaaccaaccggtagcttcattaattggggcgcgtttgggtgcgtcagtacaattaggtttacaagcattaattttgggagttgtccttggtgtaatcgctggggcaattgctgctatgagacagggtacttgggttgactcaactgctactgtaatttctattttgggtaaatcagttcctaactttgttttagcagttttgcttcaatactacatcggtttaaagctaggttggttcccaattgctggttgggggcaattttctcaaacgattatgccaacgattgctttggcagttggaccatttgcggaaacagctcggtttatccgaaccagtatggttgataccttaagtagtgactatattgagttaggtaaggccaagggcttaagtagaatggaagtcattagaaaacatgcaatgcgtaattcaatgattccattagtaactctgattggtccttatgctgtagccttgatgactggttcaatggttattgaaaatatctttaacgttcctgggattggtgaacaatttgttaagtcgattttgactaacgactatccaacaatcatgggaattacgatggtttactgtattggattagtagtaattctgttgattactgatattgtttatggattaattgatccaagaattagattagatgaaagcgaggcctagaagacaatatgactgaagaaaaattaaaccttcctgcagatgcctttgaacccttatcaaaagatgaagcacaggataacgaaaacattgcaggtccatctttatcgtttgcacaaaatgtttggcttcgcttcaagcagagaaaagcagctattatttctgcaattattgttattttgatgattgtagtagcttttggttcaaccccattcatcaataaatctactttagttaaatcgcacccacaatatgccaatttacctgctaaagtgccaggaatgagcgcaattaacgggttgaacggtaagattaagcaaaatggcaagtgggttgatgcttatgcccagaatggcgtgcctaaagataagtattttatcgcaggtacagattatttaggcagatctttgggacaaagaattatctatggtacaaagatttcattgatcgtcgctttagttgcagctttctttgatttaactatcggagtcgcgtacggaatagtgtccggctggaaaggcgggggagtcgataacgtaatgcagcgaattatcgaaattatctcttccgtgcctaatttaatcattgtagttttgatgttggtggtattaaaaccaggtattaagtcaattatcttggcaattgctatttcaagttggacgacaatggcacggcaagttagagcagaaactctgagtttgaaaaatgaagaatatgttttggcagctagatcattaggtgaatcaccttggaaaattgcttggaaacacttagtgccaaacctttcaagcatcatcattattcaaacgatgtatactattccaactgccatcttcttcgaagccttcttaagtttcatcggaatcggtatttcagccccagaaacttcactaggtgtacttttgaacgaaggacaaaagaattttcaattcttgccatatcagatgtggtatccagcaatcgtattgtgtgtgttgatgattgcctttaacttattaggtgatggtttgcgtgatgccttcgatccacggggacaaagatagaaaggattaacctaaatgccagaagaaagagttttagatgttaaaaatttaaaaattgatttccacacttatgctggtgaggttaaagctattcgtaacgtttcctttcacctaaataagggagagacgctcgcaattgtaggagaatcaggttcaggtaagtcggttactaccagaagtattatcggtctgttagcacgaaatgctcagattgaagacggtgagattgatttccacggcaaaaatttgctagagttatctgaaaaagaaatgcaaaaaattcgtggtaacgaaatttcgatgattttccaggatccaatgacttcgcttgacccaactatgaagattgggcagcaaattgcggagccattaatcaaacataagggtgcctctaagaaagaagcttgggctaaagccttggaaatgatgaaggccgtgggaatcccaaatgcagaagaacgaattaatcaatatcctcaccagttttcaggtgggatgagacaaagaatcgtaattgcgattgctttaatttgtgagccagagattttgctggctgatgaaccaactacagctctagacgtgactgtccaagctgaaatcttggacttgatgaaagacttgcaaaagcgggttaagacctcaattattttcattacgcacgacttgggcgtggtggccggtatggcagatagagtagctgtaatgtacgctggtgaattcttagaattcggtggtgttgatgaaattttttatgatccacagcatccatatacttggggcttaatcaattcaatgcctactttaaacagtgatactttggagtcgattccaggtacgcctcctaacttgcttgatccgcccaagggtgatccttttgcaccaagaaataagtatgccatgaagattgatgtggaaagaaagccacgatttttcaaggtaactgatactcactatgctgcaacctggcttttagcaccaggtgcacctaaagtggaaccaccagctgaaattacacgtcgctggaaaaaatataacttgatgaaacaagaagataaactgccagaggttaactagtcgcggtaaaggagatttttatgccagaaaaaaagaaaattttggaagtaaaacatctaaaacaatactttaaaaaatggtcgtaatgtcaccaaggctgttgacgatgtaagctttaatatctatgaaggtgaaactttcggcttggtaggtgaatctggttctggtaagacaactactgggcgctcaattttgcaattgtataagccaactagtggcgaagtgatttttgaaggcaaaaatgtagcagatttaaaaagtcgtgcagacaaactagcttttacacgggatgcacaaatgatctttcaagatccttatgcttcacttaatcctagaatgactgttgaggacattattgctgaaggattagatattcaccatttggttaaaaataaagatgaacgaactgagagagtagaggaattattggaaactgttggcttaaatgcaagtcatgctagccgttttccacatgaattctcaggtggtcagcgtcaaagaatcgggattgctcgcgccttagccgtagagcccaaatttattgttgcagacgaacctatttcagctctagacgtatcaattcaagctcaagtagttaacttgatgattgaattacagaaaaagcgtggtttaacttacttgttcattgcccacgatttatcaatggttaagtttatttctgaccgaattggtgtaatgcactacggtaaactactggaagtaggtccagccgatgacgtctatgatcgaccacttcatgattacacgaagagtttgatttctgcagtgccaattcctgatccagaagttgagcggagccggacaaggattccttatgacgctcaaaaagaagaaatggacggaaagcaacgctcaatgcatgaaattcgtccaggacacttcgtacgctgctctgacgatgaagtcaagcattacgaagaagtagcggcaagctacgaaaattagataccaaatctaatgcaactctctctatattaatattatatttatgctaaaaaggcgatccgatatggatcgcctttttatatgatcattgctcgttaagctaatgaatcccatgctggtaggtcagtgattggaccttcagcgagcttcttttggttttcagttaagtacttcttgtggactacaacttcgtaaacatagtccttaaaccattcattattcatgacgtagaagcctttaacaccagatttatcgccccatgagttctcaactttccattgacgaacttcgccgttgtcttcatcaacaccaactaaagtcatggcatgtgacacttgaccgacgccggtctttaatctgtctgctttagacattttaaggtcaacgccgaataagtcatctaacttgtacaaattagtgtcaaggtaaccagttttacggtccatttgacgtaaaacatcgttaccaaaccaaacagcttcgccgtcttttaattgagcgatagcagcgctggacaagtattccattggtacattcaaaagcttgattctcagtgagccttcaatgttgtcttcagctggtagaccataaagcttgttatagtcatggtctggagcattggttaaaacaacatagtcatcaaaatcaacgtcgcccatgtacttgtgtaaaaactcaagtggagttaggttcttttctaaatgatatttcttgtcgtcatcacgatattcaagatcgaaagtcttaggtggttcacctactgcgatagcagtcatttggtaaacttcgcttaaaaatttttcgcgaacctttttaatttcatcatctttgccgtattgcttcaagtggcgcaatactaaagcatccttctttaacttatcgcccaaagcagtagcaaaaccagttgtatcattggtgttaaaagtttctggcattgcatatgaaggaacaacaccatatttttcaactaaagcggcagccatttggaattgtccaccatcactaccagcaaagtctaagtcagccttaacttgacgtgaatcaagtggcatgtcagcactgtctaagattctgttgtagaacatgttagcacgttcgatcttatcccagaagaagttgtaagcttgtgagaaggtgaagtccttagccttatatttcttaccaaaagcgtggcgcaaaacgttcaaagtcgcaaacagccagcaacgaccagaatgtttttggttagtgacattatttgtatcaagttcagttgaaaagacgcgggttaattgtccttgaacacgatcattataagatgcttcaagtacaccactgcgttgagctgcacgagcaacgactttattttcaggttttttattaaattcggcagagaacttttctagttcctgcacagttaattcatgagccataaaaaatctccttttcattttataatttttttctcaatttaattctattttaaagcaaaacaaaagcgggttcaatcagaactcgcttgagagaattattaatccgtcaacttattagatttcttgcctatatctaataaattaatcaatttggatagaattgccatcattgccagcagtttccttgggcaaagtgatggtcaatacaccattatcatactttgcatgaatctcacttgcaactacatttggtaatctatagcttctagaaatactgccctcacttctttccttatgaatgatatttctatttttatcgctagtgtccttaaatgattttcttgtgccgctgacatttaacgtaccgtcattatagttaacgttgatatcctgcttatccatgccaggcatgtcaatcttaactagatagtccttatcagtttctgcaacatcagattgcataatgttttcaatttcattatcgtcaaagaagtttcttggaaaaccaaaccaatcattcattgcatccatcatgtcgtttcgccgattcatcatattgtttgccataaataaaacttcctttcatttttgtatttgcttaattagaatataaggaaaagatcaactcatttcttgatctcttttctccttacactgtttattgtagtcgctttttatagaaatgacacaaattagcactcaaaaatttatagtgctaattttagactgataacgctgctacaataacattctgagattgtagataattattacgtatagaaaaataaagaaagtttgtgaaatagaaatggtatattttcagaaaatgacaccagaaggctatcaacaaattgaggatgaaattgctcgattaaaaaaagatcggccacgtagaattaaaattttgcaggctgcacgagctttaggtgatctttcggaaaatactgaatatactgaagcaaaacgtgatctaggtcacttacaaagtcgtctgcgttacctaggcaaacaattaaagtatgccgaaattgttaaagctgaagatgatggtaaggttgatctaggaaagaccgttgtgcttaagtttgatgacgatgatgaaacagaagaatacaaagtagttgggcgaatggaagcggatcttgctgctggcaaggtttcttttgattctccattgggtcaagcaatcatgaaaaaggaggctggtacaacagcaacggtggctgcaccagcaggtgaatatcaagtaacgattgtggaagttaaataagttgagaactataataaactgtctttttctggtataatatgggttttgtaggatacaattcagagtaggagtgaagaatttgaatacgccacaatcaagagagggtaatgtgatccgctatgccgtttatttagctggctatgtcgctgtgtttgcagtagtaaagctagttactagaaaatctccggttcatatttgggatttgattttattcggcttagttgcagccatgattctgttgttttatgtttatcgtttcaatcgagagcaacgcttttttgcccgtgattttaaacttccatggttgggcagtttgtcaactgttgttctattaacattagtgattacagttacacagatttcgatttcatacttacaatcatatggcaggattagtcattatgatttccaattgatatatgccaaaagtgaatcagttaacatgttttggtttttaatcgttgtccaaggaattgtattaccaatcctacaagaatttttggcgactggctttttgttcaattatgcttttcggcgaaatactaagcaagttgcaattatggggatcattgtttcaggtctgatttatagcttactgagctttcaaaattcagtagtactgtttattattgatgcaatttatggcatggtgtttgcttggagctatatgtacacacaaacattattgatgccaatttacttagctgtagttagtggcgtacttacagtgattatgatttaaaaacaaaaggatgagaaaaattctcatccttatttttgtataaaaaaagcggatagcgtgaatcgaacccgcatctacagcttgggaagctgtcgttctaccatttaactatacccgcaatatgtttttattttagcattttttctatttgaagatcaacacttttacgatcaattaagctggtaaaattttgaaaaagccagcggcgtagttcgttgggcataacaactagaggcattctattatggattggcgccatatctttgttaggcgcggtagtaaccattgaaaaataatcctgatcataaatacctgcaattaaggtaagtggttgattagtgcggaaggcgtagctatcatggtatttacgaccgttttcagcaatatgggtagttttagcatattcaaagaatttttcggttaagattaagcaacgttgcttggcaaaggatttgtcccacattgaaggcgctgaatcataaaatcgctcaattctagcgttaaataatggcttttttggatcaacgggacttggatagccccattttttgttgtttaattgcaattgaccattttgataaagcaaaacaggtgctacttggttaggaaaaatatcttgtgcttgaatgtcaaaatttggtgtaactaagggcaggtcaagatcgcttttgagatattgttgaatttgttttaaattaggtaaacgaaactggttgcacatacgcatttcctttctttagggctagtttaatcatagcctattttttgttaaaattaggtaattaaacaattaatattaataaaaaaataaacttaaaaattagaaaagagcaaaaagatggcgaaagaaattttattaactggtgaccgtcctactggtaagctgcacattggtcactatatcggttcattaaagaatagagtaaaattacaaaattcaggtaaatatgatccatatattatgattgcggatacacaggctttgaccgacaatgctcgtaatccggaaaaaattcgcaatagtttgatccaagtagctttagattacttagctgttggtattgatccagctaaatcaactatttatgttcaatcacaaattcctgctctatttgaattgactgcttactacatggatttagtaactgtggctcggcttgaaagaaatccaactgttaagacagaaattaagcaaaaagatttcaaagactctattccaattggctttttaaactatccagtttctcaagctgctgatatcaccgcttttaaagcaaccgttattcctgttggagatgaccaggaaccaatgttggaacaaacacgtgaaatcgttaggacttttaaccgtgtttataattgtgatgttttggttgaacctaaaggttatttcccacctaaaggtcaaggacgtttgccaggacttgatggtaatgcgaagatgtcgaagtcacttggcaatgcgatttatcttgctgatgatgcaaagacagttcaaaagaaagttatgtcaatgtacacggatcctaaccatattcacgttgaagaccctggtaaggttgaaggtaacactgtctttacatatcttgatgtcttcgatccagataaggacaaggtggcagaacttaaggcagaataccaaaagggtggcttaggtgacgttaagattaagcgttacttaaacaaggtccttgaagcagagcttgcaccaattcgtgaacgtcgcgaaaagtttgctcaagatgaagatgcggtttatgaaatgcttctggaaggttcaaaaaaggctaataaagtggctaatgcaacacttgaacaagtccgtgacgcaattggtttgaactatttcaagaatagataaggctgaggtaaagttatgcacgatcgaattccttggaaacaatattttatgatgcaggcgctagtaattgcgcaacgctctacttgtaatcgcgcattagttggtagcgtcttagtaaaaaataatcggattattggcactggttataatggttccgtttcaggacaaccgcattgtgacgatgtgggtcatcaaatggttgatggtcactgcgttagaactattcattcagaaatgaatgcgatcattcagtgtgctaagtttggtgtttctacagaaaatactgagatttatgtgacacattttccttgctataattgctgcaaatccttgttgcaggcaggcgtgaaaaaaattaactattattttgactatcgcgataatccattggcgatgcaactacttcatgatagcggggtgccttatgaacagattaagattaatcgcaaatacgtggaaagcttggcccataaacttgaagaagacgagaattaatttaatttggttaatgggactagtaactgtatttttaataacgacaggatttgtccagccaaatattgaagatcatgctcatattttagataaagaaactcgcactttgattacggaaaaaaataatcgctattttcagactaaagaacaaccgcaaattgtcgttataacggttaaaaggctgaataagttaacacctaagatgctagatcattctaagcgaacggtctttattgtggtaggacagaaaggtaaaaagcgtaatgtgcaaatttattcaactaaagatttgcatagtgccttcaccgaggtcgctcggggcaatatcttgcgtgctgaagtagataaattgcgtagtcaaaataatgcaacttttaacaagggaattcgcttcgtctttcgggcatgtgcgactagagttgatcaacaatatcaatatgcacttgataaatatgatttgacgcaagcagaacaaaataaagtcgcgcgtccacatagtgtagctttaccaatcgcactggcactggcatttttaattacgggaattacttatttcttgcgtagatttagtcatcgtgatccaatttctaagaaatagtcggcttgacttatttgcattttgtccttacactttttatagacataattagcgaaaaactgttaggtgagactcctacgtgaacacacgctatcgcccagaaacatccagagatgccaacgggttaaataggtgtcgtcgacttaaggcgagatccagatagctagcatgtgcttacgtcacgtagtgttaaaactgaacgacgagtatgacagagccttgtttggcaaaagtcacctgcagagttacaggtggcttttttgttttgcttgtcccaattaaagaagggagcaaataatgttaaaagcagctagcaagaagcgatcgaatatagacattcaaaggattcaacggattgcgcgtgagtcacgtagcgagacgctggcgcgtttacaggcgagtgctgaagggctttcgactaataaggctgaagaaaacagaagagaatatggcaaaaacgaaatcattactaatagcaattcctctaaatggcgcttattatgggaatcaatcgctacgccatttacgttagttttattagtattaactttattaaccctgtttactagctatattttggtgccacaaggagataatgacttaattactacgatagtgatgatcgtgatgttgattatctcggttctcgtcaattttatccaaaaaatcagaattgctaaggtaactgatcaattactcaatatggtatcagttacaacgaatatccggcgtgatggcaaaaatgtggaattgccaacagatgaagtagtggttggtgatgtaattaacttgtcggctggtgatatgattccagcggatatgaagttgttaactagcaaagatcttttttgctcatcaagctatttagatggggatcctgagccggcagaaaagatggctaatgtagtaattaagccgagtatggctaatgattatttgaactaccctaatattctatatgagggaacaactattgtttcaggctctggcaccgggattgtttttgcaattggcaatcacactgtttttggcaaagcagttcaggctatttcccgtaaaaaagtaaaaactaccctgtttgaccgggaaatgaagcaattagctaaaatattgattatcgcgacagcaattgtgattccgcttttgtttgtgattaatggcctgactaaggggaattgggggaaagcttaattttcgctttgacagcggcagttggcttaacaccagaagtgttgccgattattgttaattccaatttaacacggggcgcacgggaaatatcccaaaatggtgctgtcgttaagcaaatgaatgctattcaaaatttgggctcaactgatgtgttctgtatcgataaaaccgggactttgacacaaaatcaagtggttttagagcgtcactatgatttagatatgcaagaaaccccacagattttgaagttttcatatttgaatgcatattatcaaactggggtaaaagatttaatcgataaggcggtaattgatgccgcgggcgatgaactagatgtaaacgaaattcagcgtgattacaataaaattgacgaaattccctttgactacactcgaaaaagaatgagcgtggtagtggtagataacgatgaacaccacgggcagcacttattagtaactaaaggtgccgctgaagggatgctggcaatttctaataaggttgaacttaatggcaaggttgaggatttaactactgcctggcgagaaaagatcttaaatcagattaatgaattaaacgatgacggtttacgggtacttttagtaggttataaattaaatcctgccccagtaggtgagttctctgctaaagatgaacatgatttaaccattattggctatttggcttatcttgatccgccaacagaaacaactaaagaagcgctggaagatcttaaaaaagattatgttgatgtcaagatttttactggtgataacgaagcagttactcgtgctattgctttgcaggtgggattaaacgttgatactgtttatgacggcacccagatcgaagcggttagcccggaagagttgcgtgaaattgttgaaaaatgcgatatatttgtgcgaataaccccggaattaagagtaaaaattattaatgcactcaaagcaaacggtcatacagtcggttatatggggaatggcaataaagacgctttagcaatgaaggtagctgatgtgaccgtaacttcgaatacgtcagttgatattatcaaagagtcagccgatattatttttgagcaaaaagatttgcagctgttagaagaaatgattctaatgggccgaaaagtcttttcaaatacaatgaaatatattaagaccttcttggtaactaacgctggtagtgtaattgcgatggttgtttcatcgctgctcttgccatttttgcctcttttgccattgcaagttttaattttaaatttgctgtttagcataagttgtctggttattccctttgatagtgtttctaaaaactatgtcaaaaagccacaaaaatggtcgattaagagatggccgaagtttgtacttaattttggtccgattctagcaattattgattttatcgcaatgggcttgatgttttatgtgatttgtccatatttagtagggtctaattatcatcattaggtctttatgacactattttattcggggatttttgtggaatcgctttggacaagaattatggtgattcacactttgcgtgatgaacgttttccattctttaagcaacatgccacgccagtggtgttcttggtgaccattggtatggcaattattggtacaatgttgccttcatcaagtatcgcgccaagtttgggcctagctcaattgccgtttggttattggggcatagtcttcttgctagaagtaatctacattttactgacgactttggttaagcacttatatttaaaaaaagaaaaattctgatttgaattaaaaggaattgctggttttagcccaattcctttttttgcatgttaaaataaaatagatattttagacgattaaaggagtttgattaatcaatggctgataaagatactttttatattacaaccccaatttattatccatctggtcgtttaacgatcggaaatgcttatactactatcgcagctgatacaatggctcgctataagcgtagtcaaggctatgatactttctttttaactggtactgatgaacatggcttgaagatcgaacaaaaggctgaagcacaaggaatcaagccacaagagtttgttgataagatggctgcttcttacaaaaaattatggaagagccttaacatttcttatgacaagtttattagaactactgatgaacaacatgttcaagctgtccaaaagatttttgaaaagctgttaaagaaaggcgacatttatttaggcgaatatactggctggtactcagttgaagatgaagaatactttactgaatcacaacttgctgaagtttacaaagatgatgatggtaatgtaatcggcggtaaggctccaagtggtcatgaagtacgtttggttaaggaaccatcctacttcttcaagatgagcaagtatgctgaccgtttggtggaatactacaaggaacatcctgaatttattttgcctcattcacgtgaaaaggaaatgcttaataacttcattaagccaggtttggaagatttatcagttacccggactactgttaactggggaattcctgttccaagtgatcctaaacacgtggtttacgtttggatcgatgcactttcaaactatattaccgctttgggctatggttcagacgatgattcattgtttaagaaatattggcctgcagacgttcacttggtaggtaaggaaattgttcgtttccacactatttattggccaattatgttaatggctcttgatttgccacttcctaagcacattatcggccatggttgggtattaatgaaaaatggcaagatgtctaagtcaaagggaaatgccgtttatccagaatcattgactagtcgttatggtgttgatccacttcgctattacttgatgcgtgctcttccatttggcgatgacggtatttttacaccagaagactttgttgaaagaattaattatgacttggccaacgatttgggtaacttacttaacagaaccgtgtcaatgattaatcaatatcaagctggtcatgttgatgcagttcctgttgctcaagctgaatttggcaaagacttgcaagatacagctgctagtgtcattaatgattatcgcgaaaatatggattcacttcacttttcaaaggcattagacaatatttggaagttggtttctcgtgctaacaagtatattgatgaaactactccatgggctttgaacaaagaaggtaaaaaggaagaacttagcaaggtcatgagcaacttggctgaaagcttgcgtttaattgctattatgattgaaccagtaatgaccgaaattgcaccaattatgttcaagcaacttggtttaaattgggacaatgaagacgctaagcatttggcctttggtgactttgattgggatgttaaagtaattgaaaaaccacaaccaattttcccaagacttaagatggacgaagaagttaagtacatcaaggatgaaatggctaaagctaagccaaagaagaccactagaagtgaacaaaagaagggtgacgaaatcaccattgacgattttgacaaggttaagatccaagtaggccaaattttgtcagttgaaccagttaaaggctcaagcaagttgctcatgttcaagctggactttggtaatggcaaggaaacccaaattttgagtggtatccgcaagttttatccagatgcaagtgagctattagacaaaaaggttttagctgttactaacttaaagccacgtaagatgctgggtcaccttagtgaagggatgctcttatcaagtgaaaagcatggcaaaattaagttagctcttgttggtgatgaacatgcagttggggctgaactcggctaatggagatcattgataatcatactcatttgaatgacgagccgtttcgcggcaaggaacaatattatttagaacgagcaaaagcacttgatgtaaccaaggttatttgtgcggggcaagatcctgactttaatcaaagagcggttgacttagcacaaaggtttgataatgtctatgcgatggtcggttactgtcccgatgtggctaaagactatgatcaacaggctgaagataaactaattgaacaattgaagcagcctaaggtagttgcaatgggcgaaatcgggctagattattattgggatgaatcgccgcgcgacgtacagcgtaatgtttttgcgcggcaaattgaagtagcacatgacttgaagatgccggttgatatccatactagggatgcatttggagattgttataacatcttaaaaaatagcaatctggaatatggtgctgttttgcatagttttaacggtggtgttgactggttaaataagtttttggatttgaatgtttacttttcatattcaggtgttgtttctttcactaaggctacggaagtacacgagagtgcaaaagctgcgccacttgaccgaattttagttgaaaccgacgcgccatatttaacgcctgagccatatcgtggtcatcaaaatgaaactggctacgtacgttatgtggcagaagcaattgctaagttgaaggatattccactagagaaagtggcggatgctacttataagaacacagtgagagtttatgggcttaaataaaaagaattttgatgcggtaatcgttgttgaggggaaagacgataccatccgtttaaaacaatttttcccaggaatcgagacaattgagactaatggatcagccgtttcagatgaagtattgaagcaaatccaaaaattaagtgagagtcggcaaattattgtctttactgatcctgactttaatggcgaaagaatccggcgcattgtaactaaagctgttcctgatgcaaagcaagcttttattacccgtaaggaaggcgaacctcataaaaaggggagtctaggtgtagaacatgcttcaaaagaagcacttgagcatgcactaagtgatttgcatgaggttgaaccgcaaaaaagtgatttaactccagcaatttatcggcaattaggtttagctggtggtagcggctcacgaaaattacgtgaacaagtaggcattaaattacgagttggctatggcaattccaagcagttttataatcgcttgcatacttttggcgtttcattagctgaattaaaggcagctgtcaaggaggtagaaaatgacaaataatattccaattggctctccagttagaacacaagcaattgttaaccgttactttgtcaaagctaaaaagaacttagggcaaaatttcttagttgatcagactgctattttaggtattgttgaagctgctgggataaaaaaagatgatcaagtcattgaaattggaccaggtattggctctttgactgagcaactactgttggcaggcgctaaagtttttgcttatgaagttgatgatagcttacctacgattttacagaatgaactgcctaagaaaattgatgatcagcctttggctagtcgctttaagattttgcttaaggatgtattaaaggctaattttaaagaagatattggtgacttttttgacttcactaaaccgatcaaagttgtagccaatttaccatactacattacgacaccgattatttttgctttagctgaatctgacttgcgctttactttgctgaccttgatgatgcaaaaagaagtggcagagcgattagaagctcaaccaggtagcaaggattatggcccattaacgatttctgttcaaacagaaatgaaagttaagcttgctttacaagtggggcgtaattcctttatgccacgacctaaagttgattctagtgtagttgttttgactccgctaaaagaaaagcctgctattgaagatcgcaagcactttatttgggttgtgaaaatgtgcttttcacaaagaagaaagacactgaacaataacttaaagtcattattgccagataaaaccaaacgagatgaattgattacagaattaggtgtagaaccacgaattcggcctgaagacctaacaattgaacaattcattaagattgctaaatttattcctgcaaagtaatgcctaatattgaatttattatatatttgtgatattatttacataaaggagctgttgtttagtgccaacatcaattatcacaattaaacataagttggattctcacttaggtgatactttaacagtagtagctcaagcgggtcgtaagaaagttactaagagacggggaattctaagagagactttccctgcagtgtttgtggttgatttagaccaacatcaaaataattttaaacatgtttcttacagttataccgatttactaactaagaatattgcattagagtttgatgataaagctgaagaggctgaagcttaaacacaatttctgaaattgtcactagcatttatttaaaatgttagtgcttttttttgccctttagagtatattaattaagtataaaccaaacattagaaaggagatttcatgaaacgttcagaaagattggtggacatgaccaaatatttaatggagcgtccccatactttaattgcactaccattctttgctaagcgttacggcgctgctaagtcatctatttcagaagatttagctattttgaagcacactcttgccagcaatcaagatggtattttggagactgtagccggtgcagctggtggcgtgcgctatattccatttttaggtaaaaaacacgcggaagcatatttgtcagatttatcaactaggattgaggatccaagtagaattttagccggtggttttgtgtatctgtcagatattttaggcaatacgcaagatttacgtaaaattggtgaattagtagctactcattatgcttatgaagaaatcgatgctgtcatgacagttgaaacaaaagggattgctttagcccaagcagttgctcgttttttagatgtaccatttgttacagctagaaagcgatcaaaggtaacagaaggtgctactgtttctgttaactatatttcttcatcgttgtctcgagtatcgaagatggaattaccgactcgtgctcttaaaaaagaagctaaagttttaattgtcgatgattttatgaagggtggcggtaccctaaccggaatggaagaattagttaaggaattcgatggtactattgccggcgtttgtgtactctgtgaagccgattttgacaaagaaaagctgattaagaactatctttcattagtaaaaattagtgaaattgatactgcccaaaagctgattgtagcagaacctggtaacttcttaactgaaactgattttgaccgtttctaaaatggtatactagaatcaagttttgattattaagaggttaatattaatggaaaaatatgtagttgttcttgccgcaggtaagggcacacgaatgaagtcaaagttgtacaaggttttacacaaagtttgtggtaaaaccatggttgagcatgttgttgatgcagctcaaggcgttagtcctgcagaaatcgttacaatcgttggtacaggtgctggcgatgtagaaaaagtactggcagacaagtctaagttttctttccaagaaaagcaattaggtactggtgacgccgtaatgactgcgcgtgaagaattgggtgacaaagatggtgctactttagtagttactggtgatacaccacttttcacaactgatacatttaatgaactattcaagtatcatgcagaaaaaggcaatgctgcaactgtattgaccgcggaagctccaaatccatttggctatggtcgaattattcgtgatgatcaaggcaatgttttacgaattgtagaacaaaaagatggcaaaccagaagaattaaaagtaaaagaaatcaatactggtgtattttgctttgacaataaaaaattatttgaagcattgaagcacgttaataatgacaatgctcaaggtgaatattacttaactgatgttttagaaatcttgcgcaatagtggtgaacgcgttggtgcttacaagatgcctgactttagtgaaagccttggcgttaatgaccgtattgcattagctcaagctactaagactatgcaaagaagaattaatgaacagcatatgcgtgatggtgtttcatttatcgaccctgatactgcttatattgatgcagatgttaagattggcaacgacactgtaattgaaggtaatgttgtgattaaaggaaacaccgaaatcggtagtgattgctacattactagtggttcaagaatcgttgattctaagattggtaataatgtcactgttacttcttcaactgttgaagaagctgaaatggacgataatactgacatcggtcctaattcacaccttcgtcctaaggcaattattcgcaaaggtgcacatattggtaactttgtggaaattaagaaggctgagattggtgaaaatactaaagtaggtcacttgacttatgttggagacgctaccttaggtaaagacattaacattggctgtggtacgatcttctctaattacgatggtgtaaagaagttccatactaatgttggtgatcatgcctttattggcgctggctcaacattgattgctccaattaatgttgcagatcacgcctttattgcagctgataccactgttactaaggacgttaataaatatgacatggcaattggccgtggccgtcaagttaataagccagattattggcataagcttcctctttctcaagataaagaatgggattaagaataaggcactagtgtatcaagctagtgcttttttgttaagaattgctaaatacttattgcaaaataataattgagacctacaataaggtgtactaataataatttttacatgaggtaggtaatactatgaaattaagtcataagttagttatggtttcagcagctgttttgatgggtgttagcccagtattaggcatggcagaaaatactgtatctgttcaagctgctactaagagtactaatggcgtacataatacttacggtaaaaacagcaaagtcaaagtaactaagactatgaagtttgtcgaccgtaatggtaagaaaacttctaagactgctcctaagggtggtagctacactatttggaacgtcaagaatatcgacggtcaagtttactacagtattcaaactgatttgaagtactggattcctgcaactgcaactgaaggtacagtaacttataagtcaggcaatactacttatactttaaagagtgatggcaagaaggtaacaacttctacttcaactaagaaggctgttaagaagactaattcaaataaaaacactaaaaaagtagttaaagaatcaactaagaaaactgccactaagactactaaaaaaagcaactcagaaaagactactaagaaaacttcatcaaagaagacgccagtggctaaggcagttaagataactactaagaataaggcttacgtttacgacaagaatggtaagcgtgtaaaaaactatttaggcactagttacattggtaaaaagatcactgttaaaggtttaggtactaagaccattaatggtgttaaatattatgctttgcaaccaaatcattattacattaaagcttcagatgtaactgttaagtaataattgataggaaaaagacactttttcgtttctaaattggcaaaaaaatattttagatctacaatatataaatgaactttaagtttagtaagaatgaggtatttatcgatgaaattaagtcataaattagttatggtctcagcagctgcattgatgagtgttgctccacttttggatactgcagaaaacgtcaacactgttcaagctgctcctaagaagactacttcaaagaaggcagcaaacaacaagatcactttggtacgtaatgcttatgtgtacgataagaatggtaagcgtcttgataagtacatgggcagtgcaaaaaacactactattgctaaaggcgtaactgttacttcaactggcactaagactatcaatggtgtaaagtactacgatcttggtggtggtgcttatatcaaggctgttaacgtagatggtaaagctgcgtcatcaacttcatcactgtcaaagggtactaaggctaagtttgtttctaactcatacatttatgacaagaacggtaaacgtatcagcaagtaccaaggcaaatctaagtttgttaagggcgattcagtcactacttacggtattcaaaccattaacggtaagaagtattaccaacttgacaagaagggtactgcttttgtacgaactgttaacattgatggtaaaaccacttcaaaccaagaatcatctgtttcaaatgatgcagaatcaactaaaaaatatgactactcattaaagaagaatgcttatatttatgataagaatggtaagcgcatcaacaagtaccaaggcaagtctaagcttttaaagggtgccgcaattgatgtttatggcattgaaaccattaagggtaaggattactaccaacttgacaagaaaggcactgcttttgttaaggcaagtaatgtaactagaaccgttaaggcaacttcaattaccatgaagaagaatgcttatatctacaatggtaacggtgacaccaagaagaagacagttaagaagggtaagactgttaaagctactgaagcaagatacattggtactaagctttactacaagattagtgataatcaattcgttaaggctgctaatgtaggtaaaatttcaggcccagaactagaaccagttaacgaaccagatggtgctgctactgttgatactggtgataatactgtagatccaaacgtaaccaaggtaactacgattaatgttgctccactttacaacattaagggacaaccagataacgttagagcatttggcgcaggtcaaagtcaacaagtttcagaattgagatatattgcaacttctgcaactgctaccccagaattattctacaaattatcaagcggtagaggctatttaaagaagtcagacgttgctgtaagtggtaagattttaactcctgttaacactccagaacaagctagagcagacgttacagttgctacagcagctgataagactaagttgcttcaagacattaacgaagcaactagtgttaagaactcagaagcttacaagtttgcttcaagtgatgccaaggttgcatatgatagggcaattacaaatggtactgctgttaacaacgatgctgcagctactattgctcaagttaacgaagcagatgctgctattgttagtgcaaaggctaaacttgatggcaagagagttgctgttgctaacatgaccaatttaacttcagatgaaatggcagctattattaaggttgtagctaatgctaataatgtagcagaaagttctgttcaattaactactaacggtagtttatcaattagtgttaacggagctgcacaaattttgaacttaggcgattatgtaacacaagctgcagttgcaaacaactaaaaatatataaaataagacgtagtatctaaaatgacactacgtcttattttttaggatattttcgttgtactagaaagtacaaatatattctaacttttttagcgattaatagttagtgcttttttatggttgcggcaaaattcttgctataattaaggagaatgtggttctttttagagcaacttttgctaaaatagagctggttaaatatttttacggaggaaattatgtcctataaagacgatatgatgatcttcgcccttaactcaaatgtaccattagcacaaaagattgcggatcgtgtgggtgttccactttccaagtctagtgttgaacgtttcagtgatggcgaaattcaaattaatattgatgaaactgtgcgtggtaaagatgtctaccttgtacaatcaaccagtaagccagttaatgacaatttaatggaattgttgattatgattgacgctgtacgtcgtgcaagtgctcgtacaattaacattgtgatgccttactacggttatgctcgtcaagatcgtaagactcgtgctcgtgaaccaattactgctaaattggttgcagacatgcttcaagctgcaggtgctgatcgcattctttcacttgacttacatgcaccacaaattcaaggtttctttgatattccagttgataacttaatgggtgctccacttttggcagactacttcttgcgtaacggcttagagaaagacgctgttgtagtttcaccagaccacggtggtgttactcgtgctagaaagcttgctgaattcttaggttgcccaattgccatcgttgataagcgtcgtccaaaggctaatgttgctgaagttatgaacattatcggtaacgttaagggtaagcgtgctatcatcattgatgacatgattgatactgctggtactattactttagctgctcaagccttaattgatgcaggtgctactgaagtttatgctagtgcaactcatgctgttctatctggtccagctattaagagattgaacgattcaccaatcaagaatttggttttgactgattcaatcaatcaaccagcagagaagaagcttgacaagatgcttttggtatcagttggtccattgatgggcgatgctattaagtgtatccaaaaccatgaagcacttagcccattgttcaacaccagatacgaagctgacaagaacaagtaaaaattatttgaagataaagaaaacgactagtctagttgactagccgtttttttcatatgtttgagagagtttttgaaataaatgtaatgaaaagtaaatattttataaatcggttccgttagattcgatgaccttcttgtaccagtcgaatgaatccttcttgtagcgcttcatagagccgttgccatgattatcttcgtcaacatagataaaaccgtaacgcttgttcatttcgccggttgatgcacttactaagtcgatgcatccccatggtaagtagccccataaatccacgccatcttctgtgacagcttttttcatctccttgatatgactacgcaagtattcgatgcggtaatcatcatgaaccttgtgatcgtctgttagtttgtcgtaagcgccaagaccattttcaacgatgaataatgacttgtgccagcgagtagtcatccagtttaaggagtagcgcaaaccaactggatcaacaggccagccccaatcgcttgccttaacgaatggattttcaactaaatcactatattcgcgataatccatgtggtcagtgtatttaactgcaaaggacatgtagtaagagaaggcgatgtagtcaactgtaccatgtttcaagatttcgagatctttatcggtgatgtctaagttgtagtttttgcttttgaagtattgagtaagccatcttggatattcaccgttaacttgaacgtcgccgaagtagaggcgagagtccattgctctttgggcaaagaggatgtcttctggcttaggggatgcaggataaattgggcagaaggcaagcatacagccgatttgcatatctggattgattgcgtgaccaatttgtacggcttcagcactagcgaccatttcatagtgagcagcttggtacattagcttttgcttgccgtcaccttccttgaatttgatgcctgagttttcgtaaacggagatatcactttcatagttagcttgattgttaatttcgttgaaggtcatccagtacttgaccttgttgtgatagcgttcgaaacaaacgtgagcaaagcgagtgaagaagtcgatcaattttctgttgctccagctgccatattcagtgactaaatgatatggcatttcgaagtgggaaagagtcacaacaggttcgatgttgtactttaagcattcgtcaaatactttatcgtagaacgctaggccttcttcgttgggttgtgtttcgtcgccattaggaaagattctggtccaggcaattgaggtgcgaaaagccttgaaacccatttcggccattaatttgatgtcttctttatagtgatgataaaaatcaatggctttgtggttagggtagtatttatccttttcgatggtggcagtcaattcacgagggtgatttggtccgccgagagtcatgaggtcggcgattgagatgcctttgccgccttcattgtagccaccttcgagttggtgagcggcgacggcgccaccccatagaaagtttttagggaaagtagattcagtcataataaaaaactccttttgtctaacttgttataagcattatatgaaatcggtttcataaatgatagacaaaaggggcttttaggaatggttcgataaaatggctggttgtacctaaagtgaaacaggttgtttcatctatttattgtttttctttttcaattaaaatattgacgattccttcaaccaaatacattacaggtacttgtgaagaaaagtcgtaagcttcttttctaaccatttgttcatggtaggtaagggaataacggctcatttttgcgatagcgctagtttcatcgccggtgatgctgatcagaaggatatcgtcattgttgacaaatcgattgatcatttccaccatttcagtggtattacctgatacagaaaagcaaataatgacattattggtagtattttccaatttgaaaacgagcggatagaacggatccgtgacaggagaggtatttaatcctagagctgccatctttcttgcggcatattctgctaaaaaggctgaatcacccattccgatagtaataatgttgtctgcttgatagattttatctgcaacgatgttcagcttgctcaaagtatcactagggaagttatcttcggtaacgtaatgtactttcacgttgtgcaggctttggtgattgttttttaaataagctttaaattcagggaagctgttaaaacctatcttatgaataaagcgcataacagaagaactagagacgtgcgctccttgggcaatgtctctgacgcgcatgtaaattaccttatcattgttttgttcgatataacgatagatagtcatatcaacggtagatagttttgataaatctttaaatccaaaaaatgccataatcttattccttaatgtgaaaactttaaactaattgtactatattggaacactgtgttccaatcacgaaatattgagcttaaaaacagtatgatacctatctcctccaaaagccttgtctaacagcaaacgctttcatagaattaaagatgtcaaatgaaaatacgttagtaaaaaagttggaggaatttttttatgaagaattttattaacaataaaatattgccgccaattatgaaatttgttaatacaaaagctattattgccttaaaggacggtatgcttttgtcattaccattcattatgatcggttctttatttttactgcttgcttcattcccaattccagcagttgctaattggatgaatcaaacaggtttgactccattttggaatcaagcttacaatgcttcatttggtattgtagctgtatttgccgttgttggtattgcttatcaatgggctaagaatgaaggggtcgaaggactccctgctggtatgactgctttcgtaggattcctaattttgatgaattctactactccagttatgaacggaactaaaaccgttgtttctgctcaacaagctccaactcttttaacaggatttattgatcgtacttggcttgggggccaagggatgatcgctgcgatcattgttggtttacttactggttggatttatacttggtttgttaagcgtaagattactattaagttgcctgaacaagttccacctgcagttgctaactcatttattgctttgatcccagcagctgtattgactgcattatggcttcttgtatatatcttctttgaaaaggtagctcatactactttaactcaatggatttacgcaactattcaaacaccacttcaaggtataaccgactcatttggtggtatcttagttttgactttgctagtaccattcttctggttctttggtgttcacggttcaactttggttgttggtattgctggtccaattttgagtgccaacgctttgcaaaacgcagctatctttaagaaatacggttacgtagacgctgcacacggtggtcacatcgttattcaaggtttgtttgaccaattctcaactgtaactggtgcaggtatgactatcggtttggttgtcttcatgtgtttcatggctagatcagctcaaatgagaagtattggtaagttggcattggttcctggtatttttaacattaatgaacctgtattattcggtgttcctattgttatgaacccaatgcttgcacttccattctttatcatgccaccactttcggctggttcaacttacttgttaatcaaagcaggtatcttgccataccttaacggggtccaggttccatggactactccacctgtaatttctggtttcttaatcggtggttggaaagttgctatttggcaggctattatcttaatcatttcattttttgtatatttgccatttgcacgtagctatgacaacgtgctttacaaacaagaacaagctgccaaagctaaagaagaaaaataatttaaagtagaaaaaatgagcttttatctctatcatttaatttgtagaatagaagctcatttttaataggggaaaataatgaaaaaatatctctcaattgacattggcggaacgaatctgaagtatgccttaatcgacgaaaaaggacatattctagaaaaagaccgcgttaaaacagatgcaaaaaatcttactgcatttatggaaaacatgtatgaagtgatcgattcatatcaggatcaatttgaaggtatcgcaatctgtgcaccaggtaagatcgatactgaaaataagatcatttatttcggtggtgcgttaaagttccttgatggtttaaatcttcaggaagcattaggtgataaatacaatgtgccaattagtgtggagaatgatggcaaagcagccgctttatctgaacaatggctcggcgaattgcgcggagtagatactggtgttgcaattactctaggcactggtgttggcggcggtgtcgttgttaataatcatcttttgcatggctggactttccaagccggtgagcttagctggatgattactaattctggtatcggcacaaagaacaaggctgcatatactggtgataattgttctgccgttaatatggttaaaaaggtaaatctagctcttggaaataaagatttagatgatggacttactgcctttgaagcgatcaataatggtgatttacgtgcattggcaatttttaaacgttactgccgcaacgttgcgattatgattattaatattcaaactgtgatcaatgcttcgaagtttgtgattggtggtggtatcagcaaccagccaatcttgattgaagaaatcaataatcaattagctaaaatccttgaagtcaacccaatgattggcaagcagatgatcccaccaaaaattgttgccgcaaagcatggcaacgattctaacttatatggtgccttgtattcgcttttgcttgaactgaataagcaataaaaaacagcctagttcgtttgaactaggctattttgatctacttattttttaacgtctgacatgaacttagcaatgcttacgctagctgtcgcaacacaagcgaccattgctgtcttacaactaatgtcgacaatatctttgactaaatccttattttcatggataaatttgaaagatgcattagtgtaatccatgcagtagccgtgaatagtgttcatcaggtctttcacttgagtgtagccactcttttcagcacgttttggttcatcctctgggttgatttgagttcttacatcattgttcataacaaatacctcactttcatttatacttatattttatttctttctaggtcttcttaagtaccttaatgcaccatttttaatatatttttgaaattgctcataaagtggatcgaaaatttgcggctgatcttcatcgtgactgagcatagttttagggaagaagaagcgttcatctccttggaaagtaccatttaatgcgcgaaccaaggggctgagttgggataactcaatcatgctgctgtcgtcttgcataatttcaatttgactattagcatttttccccgttggcttataagcatcatatggttcatcgaatgcggaattggtagcggtatagtagtcaggattaaagccagcttgcttgattaggctcttgagcttaggtaaaagatttttggtttcttcatcgattcggacactagctagcggttttctgtacaagtaacgcttggctaggtcagataagattggatcttgtgcctgggtccacatagaaaaattagtttccattactccatcatcaagctttaaataatcgtctaaagtccaattgccttcaaggaatttagtcaagctaggtgtaacttgcagatttccctttttataaacagcttgagcgcgctctaaaaggtgatgcaagatgacttccattgagcgtcctacgcggtggaagtagacctgttggtacatctgatagcgtgacacgatatagtcttcaacggcatgcatcccattgttggtaaaacaaataccattttgataaggacggattacccgtaaaattcttgataaatcgaacctaccatagttaactccggtgaaataagcatcccgctgcaaataatccatccggtcagcgtcagcttgacttgagatcattttaaccacttgcggattaggataagtcttagcgattacgctggcgactaattcaggaaagttaggtgcaacttgttttaatgcatggttaatttctgtattaggatcagtaatgatcttttgtccaattttttcatgattggtgccaaaaaggtgctcgaatgtgtgcgaatagggcccgtgaccgatgtcatgaagcaatccggcacattctaccagtaatcgattatcatcgttccagagaccgtctcctggcgtaattgagggatattttttgctaaagatatcgcaaattcttctcgttaattcataaacgcctaagttgtgctcaaatctagtgtgagttgcacctggaaaaacatagctaacaggacctaactgtttaatgcgacgcatgcgttgaaattctttagacttcagtatgtccaaaacaactttatcttcaatatgaatatagccgtgaaccggatcacggagaacaacctcttgttttaatttttcgctttgaaatcttgtcataaaaatccaccaagtttaatttattaattttttgaactatatataataaaatagattatatctaactaaaattatatcagagatatagtaataatgtttaaagggggcgcttgtttgacagcaattacgattgatttgactagtaaaattactcaagacgatgagacagagacttttacgcgacatgcgcaagggcaattgactgaagaaggcgacgtcacacgaatttcttatgccgaagaagggcaaattccagtgaagatgcttctaaaggagaatgaattgttgattcgccgcggcgttgacagcaataattattctttaatgaaatttattccgggtgaaaaaggcaactgccgctatgtagttgaagggcgccgcatggacatgaccagcgtgactaacttgcttgaatatcagagtcaagatgatggttcacgtaaacttcgggttgaatatgacctctttaatggactatacttaataggtaactatgcagtcacgttgatttttacttaaaggcctagtagaatagtaaagattgtataagagaggacgtacagctgtgggattagacaaatttaaagacaaaaatcgcgatgaattgtcaatgatcgaagttgctcgtgcaattttggaagacaatggcaagagaatggcatttgccgatattgttaatgccgtacaaaaatacttgaataagagtgacgaagaaattcgtgaacgtttaccacaattttatactaatatgaacactgatggtgaatttatctcaatgggtgaaaatgtttgggcacttcgttcatggttcccatatgaatcagttgatgaagaagttaaccaccctgaggatgaagaagacgattcacgtaagcaccacaagaaggttaatgccttcttagctagcgctactggtgatgatgacattatcgactacgataacgatgatccagaagatgacgacttagacgccacagacgatgatactgatgatgtattgccagatggcattgaaggtcaattgtcacaattaaatgatgatgatgatgatgacgaagaagataattaatttgcttgacttaagaagaaaaagcagataatatttttgttgggcaccctatgtgcgtttagctccccgttagtgggagcttttttgtttaaaggataagttaaaaggagcagaacatgacaaaatacatcttcgtaactggcggtgtcgtatcttcacttggtaaagggattactgcatcaagtttaggtcgacttcttaagaatcgtggcttgaaggtcactatgcaaaagtttgacccatatattaatattgacccaggtacaatgaatccataccaacacggtgaagtttatgttaccgacgatggtacagaagctgaccttgacttaggtcactatgaaagaatcgtaggtgttagaactagcaagtattctaacgtaactactggtaagatttaccaagaagttttggaaaaagaacgtcgtggtgactaccatggtgctactgtacaagtaattcctcatattactgacatgatcaaaaagaagatcatgcgtgcagctttgactactgattcagatgtaattatttctgaaattggtggtactgttggtgatatcgaatcaactccattcatggaagctattcgtcaaatgcgccgtgaagttggtccagaaaatgtaatgtacattcactgtactttggttccacttcttcacgctgctcatgaaatgaagactaagccaacacaacactcagttgctgagcttcgtagtattggtattcaaccaaatatgttagtgcttcgtgctgaacaaccaattgaccaagaacacaaagacaagatttctacttttacagacgtgcctgttgatcgaattattgaatcaattgatgctccttcattattcgatgtgcctttgaacttccaaaagcaaggcatggatcaaaaagtctgtgatttcttacacttagagagtccaaagccagaagctgacatggaagcttggaagaagcttgatgaacgtgctaagaccttgaagcatcacactaagattaccttggttggtaagtatgtagagcttgaagacgcttatatttcagttactgatgctttgcaacatgcgggttatctttacaacactaagattgatgttgataaggtacaagctgaagacgtaactgaagataatattgcagaaatcatgaaggattcagatggtttgattgtccctggtggttttggtactcgtggtcttgaaggaatgattactgcaattaagtatgctcgtgaacatgacatcccattcttaggtatttgtttggggatgcaaatggctagtgttgaatttgcacgcgatgtattaaaccttgaggatgctaattctgcagaagcagagccaaactgcaagaataatattatcgacattatggctgataagcgtgatgaagaaaatattggtggtactttgcggttaggtatttacccagctactcttaagaagggaactaagactcgtgcggcttacgatgatcaagatgttattcaagaacgtcaccgtcaccgttttgaattcaataatgaataccgtgaagcctttgaaaaggctggtatggtcttctcaggcgtttcaccagataaccgcttagttgaaattatcgaattaccaaagaaaaaattctttattgcagcacaatatcacccagaatttttgagtcggccacaacgtccagaaggcttatttaagtcatttattggtgcagctagtggtcttccagcacaagaattttaaagtgattaaagtttgattatacaaaatcttaagaaaacaagaactgagagacctcagctcttgttttttttgtaaatatcctttaacattattatgattaattgaaagtagaaaaggatttgttttcgccaatgaagcagatgataattcatggtggaaagcccctgcagggtgatgtttggatcggtggagctaagaactcaacagttgctcttattccggcatcaattttatcaagaacaccagtgaccttggaaggcgtcccaagaatagctgatgtggttaacttgatggacttgttaagtgagatggatgtacattgtgatttcggtgaaaccactttaagaatagatccaactgatatcaaaatgagtccgttgccagctggtaagattaagagtttgcgcgcttcatattactttatgggtgcgctacttggtcgctttggcaaggcagtagtgggcttccctggtggtgacgatattgggccacgtccgattgaccaacatattaagggctttgaagccttaggcgctagcgtaaaaaatgaaaatgatcaaattataattactgcaccagaagatggtttgcatggagcaaaaattcatttaaagatgccatcagttggggcaacgatgaatattattatggctagtgtgacagcacagggccagactataatcaaaaatgccgcaaaggaaccggaaattattgatttagctaccttcttgaacaatatgggggcagttattcgtagtgctggtactgactctattcgaattgaaggagtggagcagcttaaagcacagattcctcatacgattattccagacagaattgaagcagggacttatgttgctttagctgcctgtattggtaatggcattcgcattcataatattatcgaagaacaccttgattcatacctggctaaagttgaagaaatgggtgtagtaatcgattcagatgaagattctttgtatgtttacccagcgggcgacctaaaaatggtccaggtgaagacagatgtttatcctggttttgcgacagatttacagcaaccaattacaccacttttattaactgctaaaagcggtgaaggtgtagtaatcgataatatttatcctaaacggattggtcatattgctcagttgcaaaagatgggagccaatattaaagttgaagataatattattttggcccatccaactaagcagtttcatggtgcggaagtaactgcaggtgagattcgggcaggtgcctgtctgatgattgcaggcctgatggctgatggtacaacaacgatcgacaaggctggtaatatcttgcgtggttatgatcgggtccaagaaaagctgcgtcaacttggagctgatgtaactatcaaggatgatcctgctgtaccgggtattttagataatatttggtaaataaaaaccacatggaagactccgtgtggtttttgaatatgtcaatttgtaggtgaaaagaatgagtttgatttttacgagacgtgcgcaaaattcagatgtggataaaattgtgcagattttgcaggatgctattacttttttgaagaaaaatggctcaacgcagtggcaaagtggctatcctaaccgagaaacggtggaggaagacatcgaaaagcaagttgcttgggtattaactgtggataatgaagtggctggctatgcggcagtggtgattggaaaagatccaaattatgccaaaattgatggtgagtggaaaaataatgtggatacctatgcgacgatccatagaattgcggttgctagccaatttagagggatgcatttgactcaattgttcttaagtaatattatttcgctgacttatgcacaggggattcacaactttagaattgatactggcgcaaaaaataagatcgtccagcatattgcattgagtcacggttttgttcaacgagggataattcaagtagatgatccgattaatcctgatcgtttagcatatgagttgaatttatgatgaaacgcgtattaattttaggttcaccaggagcgggcaaaagtacatttgcacggaaattgcaatcaaaaacgaaattgccattggtgtatatggatcaacttttttggcatgcaaataaaactacggtctccaagcatgaattagatgaaaaagtaaagcgcatagtagctaaaccagcatggattatggatggaaactatcaacgtaccttgaaatatcgtttacccaaatgtgatacgattttttggttagattatccaactgaagtttgtctagctggcgtaaaagctagaaaaggaaaaccacgtcctgatttgccatggattgaagaagatgaagatccggaatttatgagttatattgccaagtttcggacagttcaaagaccgattttagtcaaagaattgcaaaaatatccaaataagcagatcattgtatttcattctcgccaagaagcaaatctgttcttgcacaaaataaggtaaacgaaaaaccacatggttgaaaattccgtgtggtttttgtatgcgattaattttttaatcaagcaagtcgtatttcaaagtcattaaaccatgaccttcgtcaaccatttgaccaagcagttcaacagtgttgttataaactgtatcagacatcttttgattagcagcaattaacttgtcttgtaattccttacctgaaaggttctttgcttctttgtcagtatcatgttggatcttgtgacattgtgctaaactcttttgttcaaaggcgtcttcaagttcaccgtaaacacggtagttggtatcgcctaattgagcagttaacttgttaagccaaaaaatcttgctcaagttaaatttaggagtggtttgccaagcttcaggggtagtagtgacattagtatagaatggcaccattgagttaaaggtgttaggaccaaaggctaaccattgtacacctgcaatttctgcaggaacatcattacgaatttgcaaaatatgggtttcaaagtttctgttaataccgataggacggaaggtcttcttttgttcaggagtaccttgatcgccataagcatcgtaaggagtgtcttggtagtgtgagctttcggcccatttaatatcttcaattgagattaaacgattagcatggcagataaaaggttgatcttgatctgctggagtgccaccaaagtctggatcgaaatagttgtgaatataccaagcacgaggattattgtagtgagcatccttaatagttgaagaaccaaagatgtggcgcatgttgtagccttcacggtctggattcaagtgatattcttcgattaaatcctttaggtctgctgaacaagcaaaattatcagaatcgttgaagtcgaaagtatcaatattcaaacggtttggtgcaataacatatgcatcatctgggatacggcgtgcaatccaatgatgaccaccgatagtttcaaggtaccaaatgttatccttatcagaaaaggccataccgttcatttcataagtaccgtatttttcaactaaatagccgacacgtttaacaccgtcaaaagctgagtgcaagtatggtaaagtcaaagtgacgaaatcttcttcaccaagaccaccttcacttggatcaagtaatgggtcaacaccttggatgcgtgaattagtagtgatggtttcagtagcggtcatggctacattttcagcgttaattccagctgcgccccaaataccatttttgcctgaaacatcaggtgctgaagtatagcgtaatggtgtttctgctaaatcagcgtcgtcaatcttttgtttagaaattacactagtgtagtgcttaggttggtcagctgggttaacagctttaaagccttcagggatgatgacgcggccaccgtcttcactacgagcgatcatcgtagagccatcaatagttgcttttttaccaactaaaatagtagtacattctgtttgtttcattggatcagtcctttactttatatttatgtttaaattatttcctaataatattgtatgcaaaaataatccgataagccaaagaatataattaatttccccgaaaggcatttggactaacaccgctatagcgtttaaatgccttggagaaggtaaattcatcgccgtagccgacttttttggcaatttgctttagattgtgtgtggtattagttaattctttcttagcggcttccatgcgcaattgcatgaggtacttttgaggtgataatttagtgttttttctgaataaagcatatagaaagctgcgtgatacgcctaatctatgacagagttcgacaatattgcaggtaggatcggtataattttgcttgagatagttaatggcaatttgatactgatcatttttcggtgttttgcggaccggtggatggttaggaaagtcttttactagatgataaaaaagttgataagttaaagcagaaatttgtaaattgtttaataaagtctttttcttatttaagtagagataaagattattgagcgtttgataaaaatctgttttttgaatttgacgcaagaaatttttattaggtaaatttgatgccttgatgctttcattaacgccgttgccagctaggccaatccagaaatattcccagggttcattgtggtcagcttgaaaggaacaagtttgactgcgtggaacgtaaaaaagatcgccagcttttaatttaactgcgtggtgtctactagaagtaaaggtaccagttccgctaataatgtaataaaaaatatcgtttttacgaagattgtcaccttgaaagaattcatcgggctgacatttttgtcgaccataaaacatgatgtagctatcaagattttggttatttaagttaggcatagacttcctcactgttgaaaaattatgttacttctattatagaagagattttgcttaaaaggtgaagaatgaaaaacgaccacattaagcggtcgttcgtgaatatttatagaaaattatgatatgtggaattataaaatgaaaaggtattttacttattggcaccacttcttccattgaataaaagattgagcagagttgcacagatgctggctacgacgataccgttgcctaagaacaattgaatggtttgggggagagtttggaagatttgaggatagacagtaacgcccaatcccatcccgattgaaatggcgacaattaaaatgttgcgattattttcaaaatcaactttagttaacattttgattccttgaacggcaatcatggtaaacatgactaacatagcgccgcctaagactgaatcagggatgatagtaactagagcaccgattttaggaagtaagcccatggccattaataagccagcagcccaatagatagggcgcttggttttaataccggataattgaagtaagccgacattttgagaaaaagtagtgtaagggaaggtgttgaaaagcccaccgaagatttgtgctaatccttctgcacgataaccttttttgaggtcttcttcggtgatatcttgatgaagtaggtcgccaatggcaaagaagacgccagtggattcgaccaaggaaactaaggcaatgatgatcatggtcaaacaagatgaccattcgaattcaggaacgccgaagtagaaaaattgaggtaagtggaaccaagaggcttgtgttacgggtgtaagtgaaactaatcccatgcaaccagcaatgatagtcccagcaattaatccaattaaaacagagatggagcggagaaatcccttagcccagacttcaatgacaacgatgatgaggatggtgataaaggcagcaataagattttttgcatcaccaaagtccttggcttgggcatttccgccacccatgttttgaaaggccacgggaatcaaagttagtccaattactgtaattaaggtcccagtaactactggcgggaagagttttttgatttttgaaaaccatccggcaattaagaaaacaaagattccagcaacgataatggcaccatacatggtgttaattgaaaatttttgcccgatcatttctaagggagctaccgcttgaattgcacagcccaaaacgactggcaagccaatgccgaaatatttattacggaatagttgaattaaagtggctaaaccacacatgaagatatcaatcgaaactaggtaagtcatctgtgtgctattgaagtgtagtgccgtaccaattaaaaggggaacggcaactgcaccggagtacattgccagcaaatgctgcaaacctaggacagcagcttttttgtgactaacttctttttgtgccatttttaattattcttctccctcgaagtgtacttgatcattttcaaagctatcgatttttgctagggcttcaaaacgtagaccttctttttctacccattcgcttccgccttggaaggtttttgcaacaacagcaccaactccaacaatgtcgcagccggcttgtttagcaatgttaaccatgcctttgactgcttcaccgtgggcaacgaagtcatcgatgattaagatatgttcgcctgggtgcaaaaatttctcttcaacgcagatcttattgttgaccttcttggtgtaagaaaagacgtcagcccaataaactgcatcattcaaagtagacggctttttctttctggcaaagatcattggcacgtgcagttggtaggctgccatgacaccaggagcaatcccggacgcttcacaagttaagaccttatcgactttttcatctttaaaaaggcgggcaaattcttcaccaacatgcatcattagttgcggatcaacttggtgattcaaaaatgaattaattttaagcacatttccaggtaaaacttcaccatcttgtttaattcgatctactaattccttcaatattattctcctcaagaaagaaataaggacttcttctacctaaaacaggtaaaagaagtccttaagattattcttaactttcattcacctatagtccggtatttacggtaccgggtagagactgtcgaccttatttcgacgatatatagatatttgtgttggcttaatcttaacagaatatattgccgaacacaagtggaaaattaaggattaatgttcgattatagtaaaaattattcagctgcgatatcgttatggcacagactgatgatcttttcgataatgccatataagatccccgcgattggccagatgatccagctgcgttcccaatcattggtaatgaagctatatcctagataaagtaagactgctattaaccaatagagtgtggcgtatttgttcataatcttgcgacagccggttaattggattgttaaattgcccaggtcaagcataatagctagggcagtagaaaagcaaaggatggctggactgcgaataattaaactaatggctaaagcgcgaaggctggcacttttttgagcagctgttaagtagccttgctcttgttgatcagataaaattggcaattcttcagttaagttattatctttgtggtttaattcaaaagaaggtgagccgcttttgagtaaataatcggtggtcactccaaataattctgataaagctacaattttttcaatatcgggaattgattgttcactttcccattgggatacagcttgccgactgacattcatcttttcagctagtgcttcttgaaaaagatgatttttcttgtgtaatgccgcaattttttgacctaatctcatgattgatcgtcctttcgttttgaaataatttgatttaacgaaaatttgcggttgcagaccaccactttttaattgcatttagcgcaactagtagttgcaactgctggttgctcaagataaaagccgaacaatgaatggctatttttaactttttgattgacctttttaatttttcctagtagagttagttaaaaatgcgtaattgaaaagagggagtaaatagtggctaagaatctagacgattttgataaaattattgtgcttgacttcggtagtcaatataaccaattaattacccgccgtattcgtgacttcggcatctattctgaacttttaccacacgatctttccatggagaagattaaacagatcaatcctaagggaatcattttctcaggtggtcctaacagtgtttacgataatggtgcattaaaggttgatcctgcaatctttaagttggatattccaattttgggtatttgttacgggatgcaattaatgtctcatgacttaggcggtaaagttgaacaagctgaaaacaaggaatatggccgcgccaacattacggttgaagatccagacagtattttgttcaatggcttgccttcaaagcaatacgtttggatgagtcacggtgatttggtaactcaagctccaaagggcttcgaagtaactgcctcaagcaaaaactgtccaattgctgcaattgctaatccagataaaaagttttatggcattcaattccacgcagaagtgcgcaattcagaatacggtttagacatcttgaagcactttgcttttgaggtttgtggtgctgaggctaactggaccatgaacgacttcatcgacatgaaggttgatgatattcgtaaggaagttggcgacaagaaagttatcttaggtctttcgggtggtgtagattctagcgttactgctactcttttacacaaagcaatcggcgatcaattaactgcaatttttgttgatcacggaatgctgcgtaaagacgaaggcaatcaagtaatgcaagccttgaacaaggatcttggtgttaacatcattcgggttaatgcccaaaagagattcttagacaagttgaaaggtgtaactgatcctgaaaagaagcgtaagattatcggtaaggaattcatcgaggtctttaacgaagaagctaagaagttaaaggatgtagatttcttagctcaaggtacgctttatactgatgttatcgagtcaggtaccaacactgcccaaacgattaagtcccatcacaacgttggtggtcttcctaaggacatgcatttcaagctgattgaaccactgcgtaagttgttcaaggacgaagtacgtgaacttggtgaaaagctgggcattccacatgacttagtatggcgtcagccattcccaggccctggtcttggtatccgtgttcttggtgaagtgactgaaaacaagcttaagattgtgcgtgattctgatgcgattttacgagaagaaatcaagaaggcaggtttacaagaaaagatctggcaatacttcactgttcttccaggtattcgctccgttggagtaatgggcgatggacgtacttatgactatacgattggtattcgtgccgtaacctcaattgatgggatgactgcagattttgcccaaattccatgggatgtacttggtcacatttcagatagaatcgtcaatgaagtagataacgttaaccgcgtagtttacgatgtgacgagtaagccaccttcaactattgagtgggaataatttcgtaccttaataagaagaggaaatcccaatatgacggcatttgaatagggtcaatattagtggaaagtaccggttgaaagcaagttgtctaccgaaaattgaatattttgcttacttttgttgaaaagtaagtgactgttgtcctacttattgtcatttgataagtggggcatttttttctctttgttgccacaaaagaaatgctgaaatccaaacggagcagtctgtttgatcgttgttgttacttatgacgaaaacataagtaaatcagatatgaaatctcgaaatgaccttgaatgaaatctcaaggtactcattctcgaatgcaatatctgatcggtcgcaaccgaaggctgaaaatttattttgccgggacggcaaacatgagggggtcattgcacgatgaagccgttaaaggatgagctaattcaaagtcgacttgatgaagatgaattagcagattttgataaagtgaagaaactgctcgatgtgaagagtaattctgttgcaattcggcagatgattaaagatgaaatgagaaagccagaaatgaatggaagcaaggtaatactgacgttgtatcagcgttattaaccaagctgtctgctgaaggtcgcctaccattgtcagaggcgttgatgggtattacaggtactaaaacatcatcacaattgagtatcttacaaaatcagttcgccgatattcaatcacagttagaaagtattatgtattcagtgacaaaaatggtcgattgaacaagtggctcatgtagttagaatcgcctacaagaccatctacaactggattgagcaaggagtattggatattggcgtggctgatttacctgaccatggaattcgccgccgacgagccaaagaaacccgtgggacttttagccatggacgttccattgaagatcgtcccgctgaagttattgaccgtcatacctcaggtcactttgaagcagatacagttttatctggaaagcgtaaaggtcaagcaatagctacgtttgtcgagcgtaagagtcgtcttatcatcgttaaacggcttcagggacgagatagtacctcaataaccaaggccattttagaattagctaaccagttagaagataatctcaagccccttactgttgaccatgggaaagaattcgctaactacaagctaattgaaaagcaggccaggattcccctatactttgcgcatgcttattctccacatgaatggggcagtaatgagaatcgcaaccgagtactacgacgctttatcccaaaggtcaaccgattgagaaaatcactgatgatgagttaattcaaattaactggtatttgaactccaggccactcaaatgtttaaactggcgcacactaattgagatctttttgcgtaatctgcgtcactaactttgttcaagttatttcttgcaatctgccgtttgaaaagagattagccttggcggttagtctcttttactatctggtaagttgactgcaaacagaaaaaagagccaagccgtcatcaaagtcgctaaaccgtgctataatgttgtcggatttaaaaataccactagatattaaatttgggaggcaagaataacgatgaagcaacttaaatttttagaaactaagcggacaccgcgttatagtttgcgtaagtttagcgttggtgtggcttcggtattattaggagtaaccatttttggaattaactttacaaatcattctgtaaaggcagcaaccatagaaagcgttaaaacttccaatagttcaccagagacgcaaggtagtgcaagtaacaatgcaacagctaataattctacagaagctgcgacaaccccacaatcttcaccagaaacgcaaggtagtgcaagtaacaatgcaacggctaataattctacagaagctgcgacaacctcacaatctttaccaaagaaagacgcaaggtagcgctcacacttatattagatcattagcagcaagatcagcagcaagattagcagctacgaattttatggtaacttctggttctgacagaaatgcagcaggtacagtagatcaaaataacattaatactcagctagctaaagaaaatcaagaattggccaataaggctaatctaacttcttcagataactacagttctaatatctataaaggtacagatggaaattattacaagattgtaactatttatggtcaggactacgtttaccgtgctgctgatattcaagctagtggtgctgattttaagggggatcctaaacaaacagctgaagatactaaaaataatatcaatatttctaaagaagatttaggaaatggtaagacccgttggaaggttgttttcttccctaataagggattacaaaatgttggcagtaaattaagtgggttaagttctgcaaaatttggtattgccctcacttctgactaccaaatcgttggtaatgttgacatgaaagtaattagtaatcctaatcaaacatttgaatcttatacatttgagcccggtagcactagcgctactgaatttccaatacaaaatctaaaaactgaaaaagacttttcatttaatcctaagacagatgttgatccaaatactggtttaattaatagtgaaaccatgccagcttataacaatcaatatttgcaaggcccatactatttcactactgctactgatgttggtgctaagaacttatggcagacttactttaaagatgctgatgaacgtaagaatgcatatgatgggtccccttatctaggtggcaatcatgactttcattttaatacttttaaaattgcaaatgaaactggagttgacggtgcaaaatataaagacccaatcatttatgacaaactggggtataggttaaattctaaaaacggtgtagctaattctaatggcgtatatagcagtgataactttaaccaagcaatgtcatttaagtcacaaggtgtcactagtaatgcacaattttcttcttatgttatttcctttactacgcaacacacagactctcatgaagtagaattaactacaggttcgaaaaatcaacaattctcaggaatcgcagctaatatttattcttatcagaataggtactatagcatgatgtctagcttatatggtgagcagagagcactggatccagctggtgcaccaaaaacacctaaagatgttatttctggttgggttgatgccactagagctctggatgagattaagaaagactatttaaataatgctcaaattaatgttttgcggaataaaattctaaataacattacagactctgatgctgtaaataacattattaaagaaggaaattccttaaacgatgctatgaaaaatcttggtaatagtatcggacagtatgatcctgatggcagttttgctgatcacaaggaagatacaacaaagaaatctgatcgctataaatacgcaagtccagataaaaaggcagcttatgacaatgcaactgaagtaactaaagctttgattaacaaagatacaggtacctatgcagatcaagcgacggtagaacagcttactaaagatgaaaatgatgcttggaacgaacttaatagtgtcaagccaaaggataatgaggttaactctccggtcggtggtaccattactattgaaaagggacatgcattagattcaactgatgccgctaatgcaattaccaataaggatagtttgactaatgtaaaaagttattcttggtcgggtactccagatacaagtaagccaggatctattagtccaaaagtaatagttacatataatgatgatagtgctgatgaagtacctgtaactgttaaaataaaaggcgatgctgacaagtacaacccagagggcggcgaaattactgttaatagaaatactaagttaggtcctacagaggctgaagaagcaattaagaatgctcaaagtttacctaatggaacaacatatagctgggctggtaaaaaacttccggacacaagtacatcaggatcaaaagatggctgggtagtagttacatacccagatactagtcatgatatagtacctgttaagattaatgttaaaaaagatgcagaaagctacactgtaactcctaataatgaagtttcagttgataagggagaagatgtagatccagctagcttagtaacagtaaccgatccagatggcaagcaagtacaactaccagcaggttcaattgactggaaggatggcgcaaagcctgacttgactactccaggtgataaaactggtagtgttgaagttaccttcctagatggatctaagaaagacactgatgttacaattcatgtaaagactgatgcagaaacttatgatccacaagcccaaccttggactacaactgttggcaaaacgcctaaggctgatgaagtaatttcaagcactgataagaatggtaagaagatgccaagtgatgcaaaatacacttggaagactgaaccagacacaagtaaaactggtgaggcatctggtgtagtaaaagtaacttacagtgatgaaagccaagatgaagttcctgtaactattaacgtcaaggataagctagatgacaaggaaaagtaccacatctatggcaaagatggtcttaaggtagataagaacggtacattagctccacaagatgctatcgatgtaaaggatgctgatggtaataagactactttaccagaaaactcaatagtagaatggactaagaaacctgactttagtcaagctggtaaggatgtaactggcgaagtaactgtaacttatccagatccagatcacagcaaatctgatccagtaactgtaactgttcatgttaatggtaaaagtgatgaatacaaggttgcacctagagatggtgtaactgttccaagaggtagccaagttgatccagaaagaacagttgttgctcaaactccagatggtcaaccagctagtttcccagatggaactacacataaatgggtaactccccctgatacttcaacaactggtaatcgtacaggtgtagttgaaactactttcccagatggttcaactactagaactacagtcactgtaaaggttcagccaaatcaaagcgataaatatgatccacatggaccagagaatccagatgatagagtcccagtaaaaaatccagaccacttaactggtggtgataaggataatgttaagggtgaagttggcaaagtaaatccagatcttccaaaggatacagaagttacagtcgatgataagggtaacgcaacgattatctactcagatggttcaaaggataaaatcccaggtggggatttggtacgtccagaaaacgacgctgataaaaatgatccaaaaggtccaaagaacccagatgatagagtcccagtaaaagatccagaccacttaactgatggtgataaggataaggttaaggatgaaatcggcaaagaaaatccagatctgccaggtacgattgatgtcgatgataagggtaatgcaacgattacctacccagatggttcaaaggatacaatcccaggtggagatttggtacgtcaagaagataaggacaagtatgatccaaaaggcccaaagagcccagatgatagagtcccagtaaaagatccagaccacttaactgatggtgataaggataaggttaagggtgaagtcggcacagtaaatccagatcttccaaagggtacagaagttacagtaggcgatgacggtacagcaacaataaaatacccagatggttcaaaggataaaatcccaggtggggatttggtacgtccagaaaacgacgcagataaatacgatccaaaaggaccaaagaacccagatgatagagtcccagtaaaagatccagaccacttaactgatggtgataaggataaggttaagggtgaagtcggcatagtaaacccagatcttccaaagggtacagaagttacagtcgatgataagggtaatgcaacgattacttacccagatggttcaaaggataaaatcccaggtggggatttggtacgtccagaaaacgacgctgacaggcatgatccacatggaccagagaatccagatgatagagtcccagtaaaagatccagaccagttaactgatggtgataaggataaggttaagggtgaagtcggcacagttattacagtaggcgatgatggtacagcaacaattacctacccagatacgtcaactgatacaatccctggtgataaattagttaagggtgaagatagcggctcaacttcaggacaaacagacgctggcaatatcacaccaaatattccaggcgacaaagtaacagtcaaggatccaagtcacttaactgatgatgaaaagaatcaagttaagaataatgtcgataatgctaacaaggataagttcccagcaggcactgaagttatagtaggcaatgatggtacagcaacaattacctacccagatggttcacaagacatcataccaggtgaccaattagttcaaggccaaaagggcgacacaactgatgctggtaacattacgccaactattccaggtggcaaggtaactgttaaggacccaagtcacttaactgatgatgaaaagaatcaggttaaggataacgttgataatgccaacaaggataagttcccagcaggcactgaagttacagtaggcgatgatggtacagcaacgattaaatacccagatggttcacaagacaccataccaggtgaccaattagttcaaggccaaaagggcgacacaactgatgctggtaacattacgccaactattccaggtggcaaggtaactgttaaggatccaagtcacttaactgatgatgaaaagaatcaagttaagaacaacgtcgataatgccaacaaggataagttcccagcaggcacagttattacagtaggcgatgatggtacaactacagtaacttacccagatggttcaaaggatgtcattgctggtactgatttagtcatcgctgctaaaagcgaagatgttcctggaagcaagcatcattcacataagaatggttcaaactctagtcaagctgatggagttaagggagcttctactgctaatggcagcatcgcaaacgctggtaacaacctaggtgttaagggtgaaagtgataatgccattggtaataacaaggctactagcttaaagacattaccacaaacaggcactaaagatacttcaattttgggtgtgcttggtatgcttttagcttcacttggtctattcgtatttaagaagaagcgcgataaagaataatttataatagttttttataaattctattggtaaaagtatctagagaaagttaattctcagatttaaaaagacgatcgaaaacttttgaaaaattgtttttgatcgcctttttgtgtgaaatgaaaacaagattctacgtaagcgtaaaataaccgagtatctagattagttttagatttcaattatgattaatttatcaatattttggaggttattcatatgtcagaaaaaaagctaatcgtccctcttgttcgtgagccaaaagctaaaaagtctaagccagctcgtaatcatttactgctttctttaaagaaaaatgacctagaattagacttccaatgtcattaagttaagctattgacttttgaaaactgatctttttaggaatcgaatcatttggattcgattcttttttttgcaaaaataaaggcgaaaagacaaacgaaatttaaaagccaagtctgcagtatattacatgtatcgcgtggcctaattaaaaaagaaatacaaactacgcttatttagcatacgcaaaaaagcatcaaattggctatctaaagccaaatgatgctttaattgtttttttctccaatgtcaatagcttaacttaatgacattgattaaatttgcgggctttatttatttttatattgccaacccaacaagcgagaaaataatttcactaattagtactaatagaacatttactaagatgcctgtaaaggttgattctttatgtggattttttacgaaagtcttagttgtgtggtaaacaagcggaatagtaagtaaactccctaaagtaataactggcaaatattttaatactattaccaatattaaaaagatgtaggctaatacatagtaacaacataaaatagtcagggcagtttttcgacctgtatagtagggcaaggttttacgtccgattttgacatcttcagccacatcgcagatgttgttggctaacatgacattggcaatgacaaaaattgccggtccagcaacgataatggctttagcccagaaaaaattatcgaagggatgcacgttatacatgttgatatataggcctaaaaatgtaatgttgtagcccattgtaattcctgaagctggttcaccaaaaggagtttttaaaatggggtaagggccacctgagtagcaatagccgattagatagcttaaaatcccgattaataaaataatccaaccgactttaatgctaaggatagttccgataattgcagaaattaacgtcaaaataatgattatttttcgagcccagcttttcgtaatattaaatttctctaggatattgttgtagctagttatatggttttgcttataacgtgcgtaatctgtgtattgattatgaccattaactgctaaatgaaagcaaatcacagctaaaaatagccataatgaatagactagattaaagttgtgataatagtagctagccatcaccgagccgataatatatggcagagccgagataataattgtttggatttggaccaaggcattgaatttttgtagtgtagaatattttttcattggttcctccataagtattaaatagccattatcttcagtataaatagatagttataatttacaattatcttgggtagaaatcttattgtttagaattaagaaagcctaatattattttttgtggtggtcgatgtaagtcagtaaagccaacaaaagcatcaaaaagctactctcgtaaaccgacatggttgaactctttctgtagtatgttgaccattgttaaaaaaggtgaacgcgtaaaatactaaatttttactctaacaaagtgtctgggaaaaagtttatttttaattaattttagactttcactcaaaaaaatcctaataaatcaaggtttattgataccaagatttattaggatttcttaatttctgagtttttcccagacactttatttagactattttcttaacttgtgcaccttatgggctagaaccatttctttattgcgatcttcatagatcatatccttgatgtaattccatgggattaacaaaggcgttttgctatttttacggaaaatgaagtctgcgtgtcgtctttccaagtgacgcaaatatcttttagcattttgaatcttagtatggtgttccaaatgcaatcgtggttcgaaatcgacgattttgtgttcagcgttgaaaataggtctaactttatggtgccagttctcagcactagagatatgatcgctgaccttttttccggcttctacgatattctctttggttgctggacttttctgatccttaaactccgcatgtggatctagatagtagttgcccaaaccatcttgacgataaagtcgtattttcttgaatgtcttatttttcttatccattcttacttcgataacgtcaccatttttgtgattcattaaatacatgtgatgttttctagtgtaatttgcacttttcatgatcagaaatctcacctctacattaattattctgaaacgatattataccagtattttaactatatttttgctttacgagtataaaagtttataatttttaaaaagaaatttcaattcttgagaattagggaaggaaaaaatcctaatgaagaaacttaatatattttattatgctaccatttggagttttattattgaaactgtcaaatcttttgtgtaaatagatctttctcgtaaattgattttttaattatttatttaatcaaagtaggattctaaggtgtcctgaacctgaccaaagcctttatgaattcgattgaaataacggtcattgtagctcattgcctgaatgccaataaaagcatcaagcgactgttcagttggaaactctgccttaggcttagctttgcgcttgatcacattgttaaatgattcaatcatgttagtcgaataaattgaagctctgatctgcttgggatagttataaaagaccagcagatctggttctatgtctttcaagcttctgataacatggctgtaaaccttgccccatttggtatagaagtcatgcaggacagctgtggcttcttctttgtttgtctgttgatgcacctgtttgaattcgttcatgatcttttcacgatcgtcgacgcgtactttagcgcagatattgcgcatgacatgaaccaaacagcgttgaaaatgagctttaggataagtcctggccaaggctgttttcatgccaacaacaccatcagaaagaaaaagctcaacttgctttaagcctcgggatttcatgttttgaagcatatctgtccagacttcaatgttctcgctaggcgcaatgcagtagtcaatgacctccttgtgcccattaggcttgatgccaatggcaatatagactgcttcacgctcaaatgtttctcggcgcaaaggaaggtatgtcgcatccaaatagacgcagaaaaacttgtcgcttagcttgcgtttgtggtaagcctcaacctttggaatcatctgcttggaaatatttgatacctgagctggactgtaatggctgccatacatcttttcaattagatcggctatgtccctggtggtcacgcccttggagtaaagcttgataatcatgctttccaagatatccgagtgctgcttgtagtcaggcagcgtgtgctgatgaaattgaccgttgcgatcccggggcacttgcacttcaattgggccaaattgcgtatcaactttgcggaaataagcaccatttctagagttgccagtattccagccatttctggcatagggatcatagcccagaaaggcggtcaattcagcttctaacaagttattaacagcctgttgtagctctttgcgcaataaatcatttattttgtctggattgaatagagcttgagcaaaatctttggtaaaatcattcatgaaggagttcttctttctgtatgtgtttttttgttcaaaccaatcatacgagaaaggaactcctttttctaatgtttaaagaaataaatttaaggaatcattcatccttacacaaactattttacagtctcttattattggaatatgctgtgctacatatttaaacttaattaattttattattaattttgtctggcatgttttgtttgataaattacctgttcctagtcaggttttaccgttttttatttgtattccttttggtttcattattggtatattaattaagcgtttaggatcatatccattaactatcgaagaagttttaatgagtgttaagcaggagggaaagatcaattatcacaattggtggaaatctttaaccttaggtcttatttctttagccgcgggtggcagtattggaccagaggcttcaactactgtactaggaagtggcatggttaattggctgggagatagattacgactaattgcttattcttctgattggaaatggaatcatttttgggatactatcgtttcgaaaaaacaactaaaaaaactgccaaaatttagtagcctttttaaatcaaaattgcatcaaaaagttttttgcttaattatggttatgatcggcgtggttggtgcagcaatagtctttaaattattccctgaagaaggattatttggtattcatcatcgccatattctctggcaatggcactatagtatgtatgtaattattccattgattgtaggttggagcttcggtatgtttttcttatggagcgaaaaatggagtgattattttgctgaaaaaattactatttcaccgattattaaagcaactatatggggaatagttcttgcattacttaccttaattactagttatgccttgtattctggtgaatttcaaattgttccatttgtacaccaggcgttgcaaatatcaccattatttttgctagttatagcagtcatcaaaaccttgtctactaatataggttttagtttaggctggcgtggtggaaaaattttcccttcgatttttgctagtgtagcagttggcgcagcgattgcgcaatttttaccaattatgccagttatgtgtgtagccattacagttagtgcaagtattgcagttatcttgggtaaacctttattaacagctattttattgattctgttattaccaatagaattggctcctgtcattttagtaagtgcgtatttagctgcctgtttaacaaaagtgagctatagttttagacaaaagaataattagggaggtatttttatgaacgaaaaaaacgatgcagtaactggtgcttctttgatagagaatcaagaagaaaaagtaaaaagcccatggccgggtcctaaaggtatgattcctgtaacaagtgggcgtgctgacgatgctaatgtacataatcgtgcctacttagacaatatcttggtggagatgcgtttgcttgattcagttgagccagacttaacaactgagatttttggtaaaaaatatgcctcacctttaactctggctgcagtctctcatttgaacagggttttaccagataagacgcgtaagccaatgcaagaaaaggcacgtgcggctaagaataccaatactttaaattggattggcatggagtcaaacgaagaatatgccgaaattgtcaaagagggcggcgatacagttagaattgtgaagccttacgcagaccatgataaaattatgggcgaactaaaacaagcagaagaattaggtgccgtagctgttggaatggatattgatcatgtgcctggtgataatggtaaatatgatgtagtcgatggtattccactaggaccgatttcatttagcgatcttgaaaagtatgttcatgcagttaaactgccgtttgtggctaagggcgtgctatccgtgcgtgatgccgttaaggctagagatgctggtgccaaggcaatagttgtttcacatcaccacggccgcgttccatttggcgtgccgccactaaaagttttgccagcaatcaagcaagcactaaatggcagtggaatgaccatttttgtagatggatcattgatgactggctacgatgcatacaaggctttggccttaggcgcagatgctgtactgattggtcgcgggattctttctgaattgttaaaagacgggcaaaaagcaacagaagataagattaagaaaatgaatgagcagcttgcacaaatgatgttatatactggcgttaaagatactaagtcatttgatcctagtgtgttacattttgattaggatagaaaaatgaaatagtttattttttacagtttactataattaagtggctattagcctataataaaggcgtttaaagctatactgaatagtgttatgcttaactcggacgttgttataaggtaattatttaaaagtaattagttgtatacgaaaacatgcttagctatggtaaaagctaagcatgatgtctcataatattgagccgcttgtagattatactacaagcggttttattttagatgaaaataacaagttttcaaaaagtgagtatctatgttttgctattatggaaatggattgatttagaaaatgatgctattgaaatttcattatgagcggggatgcaaaaccttttttaaaaagcataagaatgagcaaaagataattaagcagttaatcgatcaagcgattactaaggaattggcaactggtatgactaaagtgaagatcgctgcaatgactcggattaagggaaaatcaatttacgagtttcgcctaaatttgaaaaaagcgggttcagcgagagtcgcttttgcagtaaaggatgagcaagtactagttcttttgattacctctaatttacagaaggatagttttagtcatgaattagaaactgttctgaaaggaagtcattatgcgtttaattccaattaagcaggcagagactttgctcaaaaaaatgtgtagtaataaaagtaaatatgtagaaattaaattattaacggcaaaaaaggatcgttcaattagtgtgaaaaatgatggtaaaaagctaattttaactgaagatggctatttgaactttacgcaggaatatgaattgactgatccagctgttggccgtcatgcagttttagcggcttttaaaaaggaatttccgcgtagtaatcgtgcatatctgattgctaaatagtatactttaactataagaaaaactatcagtgttgattagaaaggaagtctttttatcaatgaaatatgcagaaaaatctcccgcattatgggatgccattcatcatgaagaacagcgccaacaagacaccatcgaattaattgcctctgaaaatattgtttctgatgcagttcgtgaagcacaaggttctgttttaactaacaagtatgctgaaggatatcctggtcggcgttattacggcggttgtcaatatattgatcaagttgagcaactggctattgattatgcaaaaaaattgtttaacgcaaagtttgctaatgtgcagccacactctggatcacaggctaacatggcagtttatcaagcacttttgaagccaggtgatgtcattttaggtatgggcatggatgctggcggtcacttgactcatggatccaaggttaacttcagtggtaaggaatataagtcttacagttacggcctaaatgttgagactgaagaactagattttgatgccattcgtgaaattgctcttaaggttaaacctaagttaattgtagccggtgcttctgcgtacagccgcatcattgattggcaaaagttccgtgaaattgcagatgaagttggggcatacttaatggttgatatggctcatattgctggcttagtagcaaccggtcaacatccaagtcctgttccagtagctgatgtagtaactacaactacacataagaccttgcgtggccctcgtggtgggatgattttgtccaacaatttagaaattggtaagaaaatcaattccgctttgttcccaggcattcaaggtgggccacttgagcatgtcatcgcaggtaaagcgcaagcattttatgaggacttgcaaccacaatttacagattatattaagcaagtcattaaaaatgctaaggcaatggcagaaacttttgctgaatcggacaatattcgtgtcgtatctggtggtactgataaccatttgatgattatcgatattactaagactggtattaccggtaaagatgctcaaaatttactcgactctgttcacatcactaccaacaaagaatcaattccaggcgatcaacgttcaccatttgttactagtgggttgcggattggtacgccagcaattactagtcgtggctttgatgaagcagatgctaagaagactgcggaaatgattattgaaattttatctgatccagaaaattccgcaacgattgctcatgttaaagaagaagttcaggcattaactaaaaaacatccaattgaataatttgtgtagcagaatttagccgtcctagttctcagctggggcggcttttgttataataaaaaattaaaaataatggagttaagagtgaaggaaacgtgattatttggaaaaattaaaaagacataaaataggcttattttcagcgattatgctggccttgaattctttaattggttcgggttggctttttggttcaggttctgcagcacaaattgcaggtccagccgcaattttatcttggattttaggtgcagtaattatcatctcaattgcattgacttatgtagaattaggttcgatgtttcccgaaagtggcgggatgagtcgatacgctcaatatagtcatgggccgttattgggctttgtggctgcttgggctaactggatttcactagtcacattggtaccgatggaagccgtagctgccgtgcaatatatgagttcttggccctggagctgggctaactggactaaaaattttattaaaaacggcagtattacttttgctggcttaggtgtggttattatttttatgctgatttttacaatgatcaattttgggtcagttaaaatcatgacccattttaccaatttgatttctatttttaagatcttattgcctactttgacgattacagttttaattgcttcaggttttcatggacaaaactttggcagtaatttacatgaatttatgccttatggtagtcggtccatttttgaagcaacttctgtttcaggaattattatgtcttatgatgcctttcagacggtcatcaatatgggtggggaattgaaaaatccgcgtaagaatattgtgcgtggggtattgatctcaatgttaattactgcggcaatctacattatgttgcaagtgacgtttattggtgcagttgagccaggcatgttagctaaagtaggctggcatgggatcaactttacctcaccatttgcggacattgctattattttaggcattaattggctagtgattttgctctacctagatgcatttgtttcaccatttgggacaggggtagcatttgtagctacggcctcaagagccctagcggcaatgacacacacacgtcatttgccaaaatggttaggtagattgaatcaaaaatacttaataccacgttatgcgatgattgctgactttgttttggcggttattttagtaagcttatttagaaactggaatttactagcaacagtaatcacggcctcaactttgattgcatatttgactggtccagttacggtaatgactctaagaaagaaaagaccagatcttgatcgtccatttaatcctggttatatgaagtggctagctccagttacctttatactaactagtttggcaatttactggtcaatgtggccaacgactattcaggtgataattgttattgccttgggtttgccgatttatttttattatgaaattcactaccaacattcaaatttaaaagaacaattacatagtagttggtggatgatcggttatttgatttttatgtcacttatgtcctttgtgggcagtagcggttttggtggtcagaactggattaagtatccatttgactttgtagtaattatcattatttctctcgccttctattattggggaattaagacagggttaaagaaaatcgatccttatgctgaaaaaattgcgcaaaataaagaataagtaaaaaaactgttgggatttttagtctcaacagttttttgttcgctattctgcttcatcaagatacttatttagcaccttgaaaacaccgttgtcgttattagtaggtgcaataaatttagcagtctttttaacgatatcttgaccattagccatggcataacttaaaccagcaaatttcaacatttcaaggtcattttcaccatcaccgaaggcaattaattcacttcttggcacgtctaaataagctaaaaattcctttagccctgcggctttatttacaccttcaggaataatatccatgtagctccaaccactagttgtgacgtggattttttctgtactacggctgttgaagccatgttctaattcatgtcgaatcttgctgggatagtccattgtgatcttagtgtattggtcatcagcaggaattttattaaaatcatcaatttcgatgctattaggataaaaataatgatgggaccgcttgtattctggtggtgtactttttaaaaagtaggagtgcttaacgccactaattaaaatgttttgggctgcaccaggatagcgtgcgtgcaaatattcaataaaatttaggatgcatttttttgaaaagcttgttgtacgaataatttttccatcgcgaactaagaccgcaccattgtcggcaacaaagtcaatagaatcgataaattcgctaaagtcatcagccaaacgaccagctgggcggccgctagcaataataaaatgtgccccgtgttgatgcagacgagttaaaatctcgctaaacatttgatgatcgtattgtttttcatcgttaacaaaagtaccgtcaacgtctacagcaacggccttaaagggaagagtagtcatctaattacctcactaaaatttgataccgttaacagtttaccatttcttgcaagtgcttacataaattatttatattatgtttaacaataaatttgaaatttacgaggtagaaaaaatgacaccatggtggaaaaaagcagttgtttatcaaatttatcctaagtcatttcaggacagcaacggtgatggcataggtgacttacaaggaattattgctcgtttagattatttggaaaatctaggagttgatgcaatttggctttcaccggtctatcaatctcccggtgtggataatggctatgatatttcaaattatgaagcgattgatccgcaatatggcacgatggctgatatggatgagttgattcagaaagctaaggagcatcatatccgaattgtaatggatctggtggttaatcatacatctgaccagcatcaatggtttgtggaggcacgaaaaagtaaggataatccttaccgagactattatatttggcgtgatcctgttgatggacatgagcccaatagtttgaagtctgctttttctggttcagcttggaaatttgatgagcaaacaggacaatattatttacacttctttgcggaacaacaacctgatttaaattggaaaaatccagagttgcggcaaaaaatctacgatatgatgaacttttggcttgataaggggatcggtggcttccgaatggatgtgattgaattaattggtaaagatcccgacaaaatgatccgtgaaaatggtccgatgcttcatccatatttgcaagaaatgaacaagaatacatttggtgatcgagatgtgatgacggtgggcgaaacttggaatgcgacaccgaagattgcagaagagtactcagatccagcacgtcatgaattatcaatggttttccaatttgagaatcaagctttagaccagcaggaaggaaaagaaaagtgggatttaaagccgctagacttaggcgaattgaaaaaggttttagtaaagtggcagacagagcttgattttaatcatgcttggaatagtttgttctgggaaaatcatgatattccgcgcgtaatttcacgttggggcaatgataaaaaatatcgggtgcagtgtgctaagatgtttgcgacagttttacatttgatgcacggcacaccatatatttttaacggtgaagaaattggtatgactaattgtccggtaaaaaatattgatgaagtagaagatattgaaagtgtcaatatgtatcatgaacgtctggctgaaggttatgacaaagataaactaattcatgcgatcaatgttaaaggcagggataatgctcgtcgtccaatgcaatggaatgatgagaaaaatgccggctttactaagtcaaagccatggttgacagtaaatcctaactacaaagaaattaatgtgaagaaggccttggctgatcctaattcgattttttatacttaccaagaattgattactttacgtcatgaaaatgagattgtggttaatggtgactttaagttggttcatgatactggtgatgaagttcttgcatattatcgtattttaggtactgaaaagtggttggtggttgctaacctatctggtgaagagcaacagtttacgtcgaccgatcgcattaaagaaaacttgcttagtaattatgctgtgcgtaatgatctgcatgatattacgcttaagccttatgaagcatttgcagtggcaattaaataagctaaaattaaaaagaacttgaattactaacttgaagatgttattctagttatcgttaatcgattaatctatgatctgtgatatgatcatggcaaaggagtaataaattatgaaacaaggtattcatccagaatttcaagaagtagttttcatggactcagcaactggtgctaagttcttagctggctcaactttgaagccatcagaaactattgactacgaaggcgaaacttacccattagtacgtgttgaagtttcatcagattcacacccattctacactggcaagcaaaagtttgctcaagcagatggtcgaatcgaaaagttcaacaagaagtacggtttgaagaagtaaaccttttatctggtggaagcagtcccattggggctgcttttttcgttagagattatttggcagaatgcatgaaagacagtataatgttttctgtataaaaatgtttttatgggagtaaatattcaatgaaaatgcaaatggcggaaattgccaaggctttaaatactacttgtgaaggtgacaatcaaactgttattacttctgttgcctttgactccagaaagatcacagatggtggattatttgtaccacttgaaggtgaacgtgatgggcacgaattcatagctagtgctattaataatggtgcttctgctactttatggaaaaaggggcatccgaacaagccagaagatattgcggttattgaagttgatgatccacttgctgctatgcaagagcttgctcgctattatttgcgtaaggttaatccaaccgtagtgggaattactggttcaaatggtaagactactaccaaggatatgattgctgctgttttgtctaaacgctttaatgtacataaaactcaggccaactttaacaatgagattggtgtgccaatgaccattcttgagatgaagccaaatactgaaattttggtgcttgaaatgggaatggacagaccaggtcaattgcatcatttaagtgaattaacccatccagatgtggccgtaattacaatgattggtgaagctcatattgaattctttggcagccgcgacaagattgcagatgctaagatggaaattactgactttttgcgtgaagatggcgaatttatcttcaatggggatgaaccattattgcaagaacgtgctgagaaattggatcaagctaaagcaacttttggttttagagatgaagatacagttcatgcaactggctttaagagttatatgcatcatgctacctttacagttaatgattcagagcaaaaattctcaatcccaatgattggtaaacacaatgtttctaacgcaatggccgcaattagtgttggtcgtcattttggtgaaagtgatgaggaaattgcctcatcattgtctaactttaccccaacggctaatcggatggagtgggaaaaaggcgatgctggcgaaagcatcatgagtgatatctataactcaaatccaactgctgttagagctgtattgactagttttggccaagttgaagtaaaagatggtggtcgtagaattgctgttttaggtgatatgcttgaattaggtaaaaagtcgccggaattgcatgctggtcttgcagatacaatggatccccagattattaacgaagtttacttatatggctctgaaatgaagaatttatatgatgctttacaaggcaaatatgagccagaacatttgcattattatacacaagaacaaacagatcgaatgattgatgatctgaagaacgatattaagtcggatgacattgtagtattgaaaggttcgcatggaatgcacctagaaaatgtcttagcccgactgagataggagaaaaatttttttgaaattttcagaattaggattaaatgatgcgcttcttaaagcgattaaacgttcaggctttgaagaagcaactccaatccaagaacaaactattccccttgctttgcaaggcaaagatgtaattggtcaggcccagactggtaccggtaagacagctgcgtttggcttgccaattttacagatgatcgacaaaaaagaaaaagcaattcaagcggttattattgaaccaacgcgtgaacttgctattcagacgcaagaagaattattccgtttaggtcgtgacgaacatgctcatgttcaagtggtctatggtggagctgatatcggtcgtcaaattcgctcattgaaacaccatgtaccatcaattttagttggtacgccagggcgtttgcttgaccacttgaaacgcaaaactattaatttagatcaagttaaggctgtcgttctagatgaagcagatgaaatgctcgatatgggttttattcaagatatcgaaagtattttgaaatatgctaagaaccgacaacagacattactctttagtgctacaatgcctaagccaattttgcggataggcgaaaaatttatggatcacccagaaattgtccgcattaaagctaaggaattaactgctgatttgattgaacaatattttgttcgtgctaaagagtctgaaaaatttgatattatgtgtcgactaattgacgtgcagggtccagatttggctttagtctttggtcgcaccaaacgtcgcgtagatgaacttacgcgcggtttgcaagcgcgtggctacaatgcggcggaaattcacggtgatctatcgcaagcgcgtagaatgtcagttttgaaaagatttcgtgaaggtaagctagatattctggttgctactgatgtagctgcccgcggacttgatatttcaggcgtaacccacgtttataattatgatattccccaagatccggattcatatgttcaccgtattggtagaactggtcgtgcggggcaaaatggaatctctgttacttttgttacgccaaacgagattggctatatgagaaccattgagcaattgactaaaaagaagatgtcgccgcttcgtccgccaacagatgatcaggcattacatggtcaattaaagcaagcaaaaattgaaattgaagatttgatgaacggtgatttgggtaaatatacccaaggggcaagtgagctgctggataactattcagctctcgacttagttgcagcctttttaaagaacttggctaaagatgaggttaaagtcaagattaccccagaaaagccgttaccatacaagggtgatggtcgccgccgtcgtggtaaaggtcatggccgtagcaataataatcatggacgcgataaccaccgccgtcgtagtaacaataattcataccgccaaaatggaaaccgcggtaagcgtggtcgtggcaacggacatgaatttgtaatcaagaataagaaagattaggattttatcttaaaaagggaagttgtaatttttacagcttcttttttgtattataatgatgtcattgtgtgaggtgaaaataatgattaaaggagtaggaattgactcgattgaagttgaacgagttaagaagatcgtggacaagggggatgcttttgccaaaaaagtattaactcccaaagaatttgatcaatatcaaaaaatggcaggcaaacgtaaagttgaatacctaggcggacgcttttcattaaaggaatctttttctaaagcaatgagaacgggtctgggaaagtatattggttttcaagatgtcgaaactttatgggatgatttaggtcatcccgttatgacttcaactaagtttgatggaaatattttcccaagtatcacacatgataatcatgaaattattacatttgtagttttggaggaaaaataaaaatatggttccaggctatcaccgtccagccgttgtaaaggtaaatttgggcgcaattagaagaaatataaaaaacgaaatgaaacatcttgcaacagggcaaaagatgttagctgtagttaaggccaatgcttatggtcatggtgcagttgaggtggctaaaattgcgattgaggaaggtgcagcaggcctttgtgtagctattttagatgaggccttgcaattgcgtcatgctgacattgttaagccaattttagttttgggagtagtttctccagaatacgctccaattgcggccgcaaacaatgtttcattaacgattcctaaccttgaatggctaaaggaagcagaaaagtaccttgaaaaagagcagttacagttgaaagttcatattggagtagattcaggcatgggtcggatcggctttaacgaagatgaggattttattgctgctaataaattcttacaaaataacgataatttctacgtagagggtatgttcgcacactttgcttccgcagacagtgctgatgatacttactttaagcatcaggtagaaaaatttgctcatatgagaagtttgttgacagttaagcctaagtggattcacgtagacaataccgctgccagcatctttaacaaggatgtgcctagtgattgtgttcgttttggaattggcatttatggtttgaacccatcctctaatcctgatagtcctgacttgaagtcatcaatttcgcttgaaccagcattatcatttgagagtgaactaactcatgtaaaaactattcatgaaggtgacggagtaggatatggttctacctttgtagctgatcaagatacaattattggaactgtgcctgttggctatgctgatggctttattagaaagtttcaaggctttaaagttaaagttggagacgaatactgtccaattgtcggccgaatttgtatggatcaatttatggtcaaaatgccaaagaaaatgccgttaggaactaaggtagtcatcatttccaatgatccaacagcgccaaataatattaaggccgccgcagattatgttgatactattcactatgaagtagcatgtttgttaaacgatcgtttacctcgtgtttactatgaaaaataagttaggcaataaaaaagtgtctgggaaaaaactagcttccagatgaataaaaacgatcaagatttccttttttaagaatcttgatcgtttttttgttctctttaaaatttttaacaataaaaatcggcccttcagccaccttctttgacaatatttgttcaaattcatcatcataaaggcaattccgatatcgatttcgaccttctctttacctcgcaggtgcgttctgcgcatgccaaatacgttcttcaaatgtccgaaaactggctctacatcatattttctcatgccatagatgtgtctgccttcttcgctttggagaacttcttttgctttttcttttaaatattgccagttaggattatagcgaacttggcgctggcggccgctagctgttttagccaattgttccaattctggcgttagctggaactcgtctgcctcataaaccttaaaatcacggacctgaccagtagaacgatccttacgctggctgtaatatttgaaattgaatctgacgccatgatgatcaatgtaataatcatctttttcattgtagtaccagttgattagcttagttggatcattcttatactttctggtctgttctttttcatacatagtgtagggaataaagtacttcttgtctggatatttttcctccagcatcgaataattgtattcactgccatagccagcatcggcgacgattttgtcaaacttgtccaacacggtcatttgatccaaaaccggctccaaagttttgaaatctgtcggattaggaaagatggcataatcaactacatattgatcggtcgtgactgcttgaatattgtagccaggctttaattgaccatttttcatgtggtcttccttcatatgcataaaggtggcgtcatgatctgttttggaataactgttgcgtccggcaaagatctcttcggcttcttcatatttttgcattcttggcacataatcttttcttagccggtgcagaatcttttttagtccacgtcgcttggcttttcgaggtgaaccgccaggaatggctttgttttcctgctcaatctctttagtcagcttgttaatttctgcttcagtttcttgagctaattcctttagcccctgactagtttgaactttttctttttccatttctttgactacttctttagtaatcaattcatcataaagttcaactgcctggcctttcagcttttcatgatacttttcaaccgctttgcgccagacaaatgtatagcggttagcatcagcttcaatcttagtaccatcgataaaagcagcaccttcattgattaagccttcatcttctaacaggttagtgaagtagataaagctctttttaatcagttcattggcatggctgcttgatctaaaattattgatagtatgatatgaaatcttttgctggtcagccaagatcatcattggcagattttcttccagcatcaactcaatctttctgccagaaaaaactcttctggagtaagcaaaaagcagtattttgagcatcatggctggatgataggctgggcggcccgttttagcagtcttgcctactaaaacatcttctggaattgaatctacaaaccagctgatgacattagccaaatgattggccggaatggcaaaatctagattaagtgttaaagcagtttgacctgtgatataattcttgtacatgttagtttccaccttttttattttgtgatgatttaataatatcaaggctggagctaaaagtatacaaaaagagcgttgaaacaaaaattcaacgttcttttttcatgatctgagacttagttttttcccagacactttttggtagatcagttttttaatccttaacagggtgttcaataaagacacctggattttcatcactcataatagtcatgccggcttgcaaatcttcgatttcagaaactacgaaaccttttctttgtaacttatcaacaatcgttctcatggtaatatctgagacaccagcggggagagtaaagagtgttcttctaacaaaattaccttcgagttcgccagcagctgcatcaagtgtcattacactagacatattagtgtgcttagacacaatcttggacatcttgatcaagttaccacgtgtattgtcagataaaacggtcaaaacgtatgaaccatttttaacatcccacgcatctgacaacatatcaagcattcttgagtgagtaagaataccataaaaatgattatcttcatcaaggacagcaatataaggcaagtccttaatgttgaaaaataccttgaagaatggtgaattgaccttaattgtcttagtggcattcttaagtaagtaagttactggtagattcatatcgccaccttgtgacttatgacggtagatatgcatcttataaatgttaccacggaaaatagtaccagtatcgtcaacgattggcacacatctgtagcctgaatcttctaaaacttttaaagcttctgctaatgtggctttttcattaactgttgttaaataatcttttttaataactaaagatttaataagcatgagttcgcctccgaaagtgagaaatgtttcaagtaattatagcatagttgatgagttaattaaatattaattaaagttcatctgaagtaacaactatattttaacaatagttagacaaataaaaaagcatctccgaaaaaagagatgcttttaagtgaaacaagttttagattattgacgaaccttaacgccagtttccttaaatgccttgtccataaccttcttcaattgatctgcagaagcagtcatcaattcttgttccttgtcacttaatggcatttcaatgatttgttcaagacccttacggccaacaactgcaggagtaccaatgtgaatgtcatgtaagccatattgaccgtccataggaactgaaagtggaagtacacggtgttcatcgttcaagatagccttagcgatcattgctgaagcagtaccgattccgtagaaagtagcacccttcttgttaattatttcgtaagccatgttagcaacttccttgtggatgtcttcaagcttagattcatccataccgtgagccttaacccagtcactaacctttacgccaccaacattgttgtagctccatgctgggaattcagtatcaccgtgttcaccaagcatgtaagcattaactgaacgtgggtcaacatgttccatttcaccgataaccttttgaagacgaccagtatcaagtgaagtacctgaaccgataacacgatccttagggaaacctgacattttccaagttgcgtgggttaaaatatcaactgggttagcaacaactaagaaaataccttcaaagcctgattcaacaactggttcaacgattgatgataaaatcttcaagttcttgttaacaaggtcaagacgagtttcgcctggcttttgtggagcaccagcagtgataactactaagtctgcatccttacagtcagggtagtcagctgcatagatattctttggtgaagtccaaggggtagcatcagctaagtcaattgcgtcaccttcaacgtgttccttagcgatatcaataatacccaattcttcggcgataccttgttgtaccattgagaatgcgaaggttgaacctacagcaccatcaccaacaagaataactttacgaggtctttcatctcttggcataaataaaaatctccttttttattagtgatatttttaacaaaatgaattataccatgatagcaagcattaataaaattattatttcctaattgtgctattatatgtaagattgtgtgcatagtgaggagtaaaaataatgaagataattgcaggtttaggtaatccaggacaaaaatatgataaaacaaagcataatactggtttcatgacaatggatcattatttgaatgaaaagggtttgtcactggataaagataaatttgaaggtcattggactaagcaaaaaataaatggtgaagatgtaattttgcttgagccgcaaacctttatgaatgaatcaggtcgttcagttagtcaagtggctaacttctttaaggttgatccagcagatgtgctaattattcaagatgatatggatatgccaattggtaaaattagaattagagctaatggcaaatctggtggacataatggaattaaaagcatcattcgagatttagggacggaaaagtttaatcgtttgaagattggtattcgtcatccgaaaaatgcaacggttgtttcatgggttttgacaccatttaatgatgaacaacaaaaattgatggatgatgcatttgcgataagtgtagatattattgacgactttatcagcggacatggtagtcaatatttaatgaataaatataattaaaatgcgtttaacagagattttagataaagatcaagatttaaataattttatttcaaaaacaaaacaagtaaaaaattcactaatcactggcgctaatgccggtgcttttagtctattgctaaaacagataacaactaaattagcagctccacttattttaattgaagaaaacgaaagtaaagcacaaaacttatatggtgaactcagtgccattatggcagatgaaactgtgcaaatttttccagtagatgctacaattgcaacgcaaacggcagttagttcgcctgatgaactgagcagccgaattcaggcacttaattttttgttaagtggtaaggcaggaatagtggtaacaacgccgcaggggctgcaatacaaactgaccaatccaactgattttgcgcaggcaaagcggagttttgagccaggtcaagaatatgaactaaaagaactcaatgaatggttgcttgcttcagggtatcagcgtgattctttggtagcacggccaggcgaattcgccatccgtggtgatattttagatgtttatccactagatcgagaaaatcccgtgcgaatcgaattctttggtgacgaaatagatacaattaaggaattcgatttagctagtcaacggagtcaaaaagagttagacaaagtagaagttgcagcagctcaagatcgagtttttactaaggatgcaattgcggcagcggctaagaaaattgaacaagatatggccagtgcaccagctcccgctaaagctgtcaaggaccactttgcggcagttcttgatgaattaaacgatggcggtttacctaaaaactatgctttcttaattgactatttgcttgaaatttctagtagtttactcgaatatttgcctaaaaatgggcagattttatttgacgatttgcctttaattaatcaagcggttgaaacagttgataagcaaaacgctgcttttattaatgatgaactaaaaactggtgcaatgttgccagggcaaagcttgcggtcagattatacaaagattctgagcaaagataagcaccatcgtatttatttctcattgtttcaacgaagcatgggacgactgcgcttaggccagatgctcaattggtcaacacgtgagccagaacaattctttagtcaaatgccgctgattaagtcagaattagaatcttatcaaaaggcggggcaaaccgtcattttacaggctgataatgaaaaaagagcacagcaaattgatcaaacaatggttgattttggcttaaatttaccaattgttggtgcagacgaaattgttgaacaacggacacaaattgtagttgatggctttgttagtggctttagtttaccaacagttaaattggtatatctaacggagcgtgaactatttaataagcgcccacaacgtaaaaaaagaattaagacactggagaatgcccagcgtttgcgcaattatactgaactgaagccaggggattatgttgttcatgttaaccacgggattggtcggtttgaaggaatcaagactttagaaaataatggtaccaagcgtgactatattacgattacctaccagcatggtgatcagctttttgtaccagcagatcaattaagcttagtacaaaaatacgttggttcagaaggtaagacaccacatattaataagctaggtggtagtgagtgggctaaaaccaagcgtaaggttcaatctaaagttgaagatattgcggatgatttgattgaactttatgccaaacgtgaatcagaaaaaggctttgctttttcacctgatgatgatctacaaaaacaatttgaagatgcctttccttatccagaaacacctgatcaattgcgatcggttaaagaaattaagcaagatatggaaagctcgaagccaatggaccgtcttttagtaggggatgttggttttggaaaaactgaggtagccttacgagcagcttttaaggcaattcaggataataaacaagtagcctttttagtacccaccactattttggcgcaacaacactatgagacgattcaagatcgcttcaaagatttcccagtcaatactactatgctatctcgttttcaaacgccagttgaatcaaaggaaattattgaagggctaaaaaatggcaagatagatttggttgttgggactcaccgtattttgtctcaagatgtaaaattcaagaatctaggattgttaattgttgacgaggagcagcggtttggcgttaagcacaaggaaaagttaaagcagttgaaggcaaatattgatgttttgacattaacagctacgccaataccgcgaacgcttcatatgtcaatggtaggtgtgcgtgatctctcagtaatggaaacgccacctcaaaacagataccctattcaaacttatgtgatggaacaaattcctagtgtagtaagggatgcatgcttgcgtgaaatgcaacgtgatggacaggtcttttatttacataatcggattagtgatatcgatgaaactgtcgaaaaactgcaggaattgatgccacaggcgcgaattgcagctgcccatggtcgaatgagtcagaatcagttggaagatattctttatcgcttcctgaatcgcgagtttgatatcttggttacgactacgattattgaaacaggaattgatatgcccaatgtcaatacaatgatcattgaagatgctgaccactatggtctaagtcagttgtatcaattgcggggtagaattggccgtagtgctcgtttggcttatgcttacttcttgtataagccaaataaagttttaactgaggttggtgaaaaacggcttgatgcgatccgtgacttcactgaactgggttctggtttcaaaatagcaatgcgtgacttatcaattcgtggtgctggaaatatgctgggtgcacaacagcatggctttattgatagcgttggttatgatttgtactcacaaatgctggctgatgcaattcaagaccgtaaggggaagacaacaatcaaaaagtcaaacgcagaaatcgaccttggacttgaggcttatattccagattcgtatatcggtgatcaagaagaaaaaattgaattttacaaaaagattaaagccgtctcaagtcaggaagaattaggtaaaattgaagatgaattaatcgatcgttttggtgactatccaacggccgtcgagaatttattagctgttgccggtctaaaggttgatgctgacatggctcaagtgctcaatgtggttaaaactgacgataagattaaagtggaatttacgaatgcagcttcacgcaaacttgagggacctaatatttttaaggcattggagcatgtaagtttaaaggctcgcattagtatgaatcaagaaaaaagaatggttgtcttgctattgttgccggataaaatgaagaatcgtgttttattcaatgaactagcaacctttttacaggcagcaagcgacattgtacaaaggtaactgtaggagaaaaatatgaggattgataaatttttaaaagtttcacgattagttaagagaagaaccgtagctaaagaaatggctgatcaaggtagaatcaaagtcaatggtcgagttgtaaaatcaagctacgatgtaaaaattgatgatattattgaagtaggttacggcgccaaaaccatcaaggctaaggtgttaaatattcgcgagaccacgaaaaaagcagaagcaagtgaactgtacgagctagttgattaatgacttttgattaaatcgttgttatacttgacttagtatagttatttagtaattaggggattaaacaatgaatcatggtccacgtatatataattcgttgagtccagaagagcagagggcgcgtcttagacgtaaacaggctaaattagagaaagaaacacaccgcaagcggttgaacgtaattatggcagtttttgctatcattttcgttgctttaggtgtacagattgcaatcaagatttctcaaactggacgactgaataatcaagtacaagctgaaaaacagactttaactaaagtaaaaaataagagaaatgacttagaaactgaaaagcaggatttgaaggatccaaattatgttgctaagctgattcgttataaattctattattctaaatcaaatgagaagatttataacgtgcatgaaagaaatgatgataactaatggaaaagtatcaagctggtaatcgggtgactggtgtaattaataacattactgacttgggcatctttgttactttacctaatcggcattctggtttggttcatcatagtgactttggcaataattggctacgcgaacgtcgtcgttatcatgctggcgatgaagtgcgcgtggttgtggtgcacatccataaagggagatttaatttatcgatcactcgagtgaatgatccggaattagttgaccatgataatcaattttctaagacaaagccagctgattttgatcaagtcctgaatcaaacaacgcgggatgctaaagaagaaattgaaaagctaaagcaagtattaactgagaattaagagatggtccgaaagggccattttttgttagaaaaataatgaaaattaatgatttttttgaacaacatcagattgacttaaaggataaaagactattagtagccgcaagtgcgggaccggattccatggctttactagatatgctagttaatttgcaaaaacaactaagttttactgtttttgcggcacattttgatcatcaattgcgtgcggatagctcatatgaagtagaagttttgcaaaattattgtgctcaaaagaagatttgcctgtttaatggcaagtgggataaacatgatcagccccaaacgggaattgaggcagcggcgcgagaggcacgatatcattttttgactaatgttgctcatagcgagcgaatgaactatttattaactgcgcatcatggtgatgatttgctagaaaatattttgctcaaatttattcgctcgggaaatcctgaagagatgaatagtttgcaagatatcggctctatgcatggcgttgttttgcttagaccactattagcctatagtaagcaagaattactcgaatatgatcaagagcgtgaaattgactatgtaatagattcaactaatacggaggatgagactgttcgaaatcgactgcgtcatcatgtggtgccattattaaaagaggagaatcctaatttaattagtaatgcactgcgttttagtgaaaaaatgagtcaattgacggatttggcggatgagcagttgaatagtatgagaacggttgagccatttttgggtgcttggcgaattaaaacggacaacttaaatgatttatctacagaagaaaaaaatattttttggcaaaagataatctggcaaaaatatcatcgccgggtaaatgaaaatttgggcaattttgaggtgattgattatcaaggttatagttatttagttgaaaataagccacagaaaattgtgcagccatttagtatcgaactaaatcagcaatttgaattcaacggagcttattatttactaactactgataggcaagctgatttgaaagaaataggaagcttttggctggaaagggatgcacattttactgcgggaagtctagtacctgctagcaaattattgttgaaaaatggtcaacgagttaaggcgaaaaagaaatttgcagaaaaggcaattccctttgccttgcgctcttgctgcattacaatttatgctgaaaatgaacctgtttttgtagaaaaatgttatcaaaaacaggactttatcacagatggtaaacattatttcctatacatttattaagaagtcttcaaaataggtgaaaatgttagtggttgcaagctaatttgtgatagaattttaaacgtataacttaaagactttgcggaggttttttatgaagaataaccggaatcggctactttcaaacggccttttctatatagttgtgttccttctgctcctatggggaatcaactgggcactcggcggctctaacaatagtggtagctcagagaatatcagttactcacaatttgttaaagatttgcgtcaaggcaaagttaaaaactttagtgttcaacctgctaatggtgtttacactgtttcaggtagttacaagactgcacaaacaacaaagaatcaatcaaataatagttttgatttctttagtaataattcaagtagaaaagtttcgcgcttctctactaccatgttacagaatgattctaccgtttctaacgtgcaaaacttggcacaaaaaagtaatgctcggatgacaactcaaggagaatcacaatctggcaattggatttcgaccattgtcatgcttgtgccaaccgttttgtttatcgtcatgctttggatgatgatgaaccaaggtggcgctggacgtggtggtggcggcggaataatgaatttcggtcgttcacacgtcaagccagaagatccttctaagaataaggttcgtttctctgacgtagccggtgaagaagaagaaaaacaagaattagtcgaagtagttgaatttttgaaagatccatctaagtacactaagttgggtgcaagaatcccatctggtgttttacttgagggtcctcccggtactggtaagactttgcttgctcgtgctgtagctggtgaagctaacgtgccattttattcaatctcaggttcagacttcgttgaaatgtttgtcggtgttggtgctagtcgtgtacgtgacctgtttaacaatgccaagaaaaatgcaccaagtattatctttatcgatgaaattgatgccattggtcgtcgtcgtggcaatggcaccggcggtggtaatgatgaacgtgaacagactttgaaccaattattggttgaaatggatggttttgaaggcgatgaaggtgttattgtcattgctgctactaaccgttcagacgtcttagacccagctttgcttcgtcctggtcgttttgaccgtaaggtattggtaggtcgtcctgacgttcgtggtcgtgaagctattttaaaggttcacgctaagaacaagccgcttgcacctgatgttgatttgaaggaagttgcccgtcaaactcctggctttgtaggtgcagatttggctaacgtcttgaatgaagccgcattagttgctgctcgtcgtaatggtactgagattactgcatcagatattgatgaagccgaagaccgtgtgattgccggtccagctaagaaggatcgtttgatttctgaaaaagaaagaagacgtgttgctttccacgaagctggtcactcaatctgtggtttggtcttaagcgactcacgtactgtacgtaaagttactatcgtacctcgtggccgtgctggtggttataacatcatgttgcctaaagatgatcaattcattttgactaaaaagcaattatttgaacaaattgttggtttgatgggtggtcgtgcaggtgaagaagcaaccattggtgataagtcaactggtgcttctaacgactttgaacaagctactcaaattgcgcatagcatggtagttaactatggtatgaccgaatccttaggtatggttgagcttgaaaaggaaggcgaaagcaatccttacggctttaagccatatagtgaagcaacttcagctaaaattgatgaagctgtaaagaagattttggatgaagctcatgctaaggcccttgagatcgttaaggacaacaaagaaaagcatagaatcattgccgaagctttgctcaagtatgaaaccttgaatgaaaagcaaattatggccttgtataagactggtaagatgcctgaaaaagacgaagatgaatatccgagtgaatcaaaggcttcaacttatgaagaagctaaggctgctgcagagaagcgcgaagttgaaaaggcagaaaaaaaggattcagatcaagcattagctgatcaagaaaaagataccttggagactccatctgaaaagaatcatgaagttgaagaaaataatcctgagaatcccgaaaaggatcaatcagaaaatgaaacttcaactcaagatactcctgcagatgatgagcataaagacaattaaataaaagtagggcctgtcacaggctctatttttttagaaaagaaggataaaaatgagtgattatttagtaaagtcaattgataagactaaaaacttacgcttgttaaccattaccgctaagggtgtagtgagtgaagcacaaaagcggcatgacttgtggtcagcttcagctgctgtgcttggtcgtactttagtaggatctcttttacttgctggtgcagaattgacagataaggaagaattgacagtccgtttattaggcaatggccctgttggtccaaccatcgtgacagctacctccgatttgaaggtaaagggttatgttaagaatccacatattgctttaccacctaagaaaaatggtcatattgatgtgaaaaaggctgttggacaaggatggtttgaagtaactaaggaccttggcttgaaggaaccatacacaggtcaggtaccaattgtttctggtgaaattgctgaagattttgcttactatttgactaagtcagaacaaattccgtcagctgttggtttgtcagtatttgttaatccaaataattcaatcggtgaagctggtggctttatgttgcaagcacttcctggtgctagtgatgctttgatcgatgaaacgattaagcgaattgatgcattgccagcactctcaacttcatttttggatggaatgacaccagaagacttagcacgtaaaatcttaggaaccgattgtaagattcttgaaaaagatgatgtagcctttaactgtgattgttctaaagaaaagtatgctggtattttggaaactttgaagagcgatcaattgaaagcaatgattaatgaagatcatggtgccgaacttacttgcaatttctgcggtaacaagtatcattattcagaagatgaattgaaagatattttagctaaaaagaacaaagataaagattattaaggcaaataaagccctaaggttttaaccagcggggcttttttgatatcataatagggtaattttgaaaggatgatttggtgaataacagctggaaaattcgcgatatcaccattccaaaccgagttgttgttgcgccgatggcgggagtttcaaactctgcattccgcgttgtctgtaaggaattcggagcggggctggttgtctgcgaaatgatttctgatcatgggatcatttatggaaataaaaagacattaagtatgatggatgttgatccgcgtgaacacccaatgagcattcaaatctttggcggaagcgaggaaactttgcttcaagctgctcaatatattgatcaacataccgatgcggatattattgatattaatatgggttgtcctgtacctaaagtaacaaagactgatgcaggttcgaagtggctacttgattcaaacaagatttatcagatggttcacgcagtagtgcagaacgttaaaaagccggtttctgttaaaatgagaacaggctgggataaaaagcatatttttgctgtagaaaatgctttagctgctcaagaagcaggcgcaagcatgattgcgatgcatggtagaacacgtaaacaaatgtatcaaggtgaagctgactgggaagtattacatgatgttgcccaggtgctagatgtgccttttgtggctaatggtgatattagaacacccgaattagctaaaaaagcattggatgagaacggttgtactgcagtaatggttggtcgcgctgctttaggtaacccttggattttgaaagatatggtacactatctggaaactggtgaaaaattgaagccgcaaactgttcgtgagaaggttgaaacggctaaacatcagcttcacgcacttgttaaaattcacggtgaaaagcgtgctgtaccagaatttcgtcagcaagccgcgtattatttaaagggaattccccgttcagcccgtactcgtgctaaaataaatgaggtctggacgcgtcaagaagtatatgatttgcttgataattttgttgacgagtatgaaaaaagagaagaagctcgtgctgcacgacgcgcgacaatgaacaaataaatggaggaaaagtaaattggcaaagaatgaaatgaatgaccaattaatagttcgtcgccagaagatggaagaattacgtgaaaacggaattgaaccatttggtcaaagaaaatttgatcgtcaagatttggcaagtactttagaagaaaagtatggcaacgaagataaagaagaattaaacgctgatatgcctaagaccaagattgcaggtcgtatgcttgcaaagcgtggtaagggtaaggttggttttgctgatctttacgaccgtactggtaagattcaaatctatgtacgtaaggatattgttggcgaagataactacaagatctttaagaaatctgatattggtgatttcttaggtattgagggtgaagttatgaagactgatactggagagcttactattagagcccttcacgtaactttcttatcaaaggctcttcgtccattaccagataagtaccatggtttaaaggacgttgaggcaatttatcgtcaacgttaccttgatttgattaccaaccatgatagttacatgcgttttgttcaccgtacccaaatcattcaagctattcgtgactacttaaatggtcaaaacttcttggaggttgaaactccagtacttcacaacattcctggtggtgctgaagctcgtccatttattactcaccacaacgctttggatattaacctttacatgagaattgctttggaacttccacttaagcgtttgattgttggtgatatggaacgtgtttacgaaatcggccgtgtattcagaaacgaaggtttggacactcaccacaacccagaatttactgaacttgaaagttacgcagcatactgggactaccatgatgttatggatgaagctgaaggtattatccgtgctgcagctaaggttgtttcagatgacggtaagatcacttaccaaggtactgacattgacttaggcaagccattccgtcgcgttcacatggttgacttgatcaaggaaaagactggcgttgacttctggaagccaatgactcttgaagaagcaactaagattgcggaagaccacgacatccacgttgaaaagttctggaaagttggtcacattattaacgccttctttgaaaagtactgtgaagaaactattgttgacccaaccttcgtttacggtcacccagtagaaatctcaccacttgctaagaagaatgctgacgatccaagatttactgatcgtttcgaaatttacatcatgggtgaagaatacggtaacgccttctcagaattgaacgatcctgacgaccaacgtgaacgtttcgaagctcaaatggaagaacgtgaagcaggtaacgacgaagctgacatgatcgatgaagattaccttcgtgctatggaatacggtatgccacctacaggtggtttgggtatcggtattgaccgtttggtaatgcttttgactgatgctccagctattcgtgatgttcttttgttcccaacaatgcgtccagaacgtgttgaaagcgtagaagctgaagttaaggctgatatggaaaagaagaataaagaaaataagtaatcttataaattaaaaaactcttatctatgttttaagcattgtactgagacgtaaaaagtagacaattaaaatattggattaatagaggcttgacttcgatactctttcggggttaagccttttaatctgctctttatcctttcgttgttatagtattcgatatattcctcgattgcttgagttaattcttgaagattatgatacttgtattcttgatcatagaacatttcagttttgagcaggccaaagaagttctccattagcccatcatccatggagttgccctttctggacatgctttgagtaataccatggagttttaaagctcgctgataacgagggctttgatactgacagccctgatcagtatgaaaaatgcagttattaagagctgtttctttggcaaaagccttgtcaagcattgtcattactaaatccatatctggatgtttggagatagtataagaaactatatcgccaccgcagccgtctagaataggcgataaataaagcttttcattattaagatgaaattcagtgatatcagtataccattttgtgttaggcagggctgcgaagaaatcacgatgaattaaatttggagctattttgccaatagtacctttatagcttgaatatttgcgcttattgcgcctgatgcctttaagacctaatttatgcatccaatagcgaacggttttctccgtaactttccagccctctctgattaactgcaaagctactctgcgatatccatagcggccttgatgatgattaaaaatctcatggattctagcaataagctttgaccgtttaggcttgacgggctgtcgtttgataatcttgtagtatgagcttctggcaattataggtagctcagggtgctctgcaatcgcagctaatacataatttaaactaactttgaattcttgccttagatccgtaatcaccctagctatttcttctgatcttcttggtccaaggcacttagtttttttacgtattcgttcacaatacgcaatcgcaagttttcttctttcagctgctggatctctttctccagttccttgcgagatttctgcttttctttggtcacgggcagggcgtcctttctgtttgataatgacattatacccgtttttcttatattctctaatccaattgttaagcatgccaatacttttaaaccccagttccaaagacagctgtaagtatggtttattgccaaagattgcttgttcaatagttcgctgcttaaactctttggaatagctttggtttttagtagttaaaatttctattccatgcatatcaattaatctaagcatatagtctaaattagctagattcattctgtacgctttagccaattgactgattgagatattttcatctttccatttatgataaatttctattttttgttctttattaaatttagacatagtaaacattctaagctaaatagtgaattagttatccgacgggataattgattcactatttttattcttttgtagaattaaagtagtggtaaaacgatatgccctgaggtctttagacacttgatgtcgcataataaactggcagttttacttaagttttcaatagtctcttcgaagaatgtggacactagatgtcgagtttagaaaattagatctgatttcttaagtaaatacgttttactactaagttttggaggtttttattatgcaagttacttttggaattgatgtaagcaagtctacttctactgtttgtgaactaattggtgaaagcaaaaatgaactaaccattactaataatcgtcctggttttattcaattgcttcatgaattaaccgctttttctaaacatccgcaaattatttttgaagctaccggtgtttattcacgcagactgcaggcttttcttgaagactacggctatgaatatgttgttattaatccgcttaaagccaaaaaagagatgaatatggggctacgctacaacaagaccgataaaactgatgcttatcatttagctttaattcaaagaatttatcgccatccggttaatcaaagcgaatcccaaacttataagcagcttaatgctttgagccgcttctatgaccagctgacaagtgacttggtaatagctaaaaatcgacttcaccaagctctacaatcgacttttcctgaaattgaaaatttattttcttctgctagaggtaaaaattactggcaaatagttgtgcgatatcctcattgtgacttagtaagaagagaagataaaaaacagcttattaactggttaatgagcttaaaggggattgcttttaaacacgctctaaggactgcagataaattaattgaattagcttatcaagcttatccagttgtatcttgctctagcatagaagtcgagcaagtgcagtattatgcacacagattgcttaatttaagtgatcaaagagaaaatttaatcgcaagaatggttaagttagcgaagtctttgcctaatcatgatttagaaaacctagaaagcattccaggctttgcacagaccactgctgtcagagttttagcagagttaggagatttacgcagatttagtaatcctaataaaatcaatgcttttatcggaattgatccaggcagatatcagtcaggagaaatggactctaatttaagtattactaaacatggcaatgcagtcgcacgtaagttgctttatcgagctattggacaaattgataatgcagctaagacaaatccgtgtcatatagcagattattatgaaagcaaaaagctatcctctcaaaccaaagggttcaaaaagatagctattgcttcaattcataaactaatcagaaccatttatgccctgattatcaatgatcaaccatatgattacaacgtagccacacataatcaaaaagactttagtcgtaattaattgatcaagtacattataacgctaagcccaaaaatcagatatggatctgggcttatttgtcgtgtctaactaaaaaaataaatcgacactaaaagatgtttaagttgaaatttaaacaaaaaatgaagccaaacttcttattatgcttgactttacgtagaaaaagacctaaaagtgtctaacttttaggtctcagttcacatggataagagtttgtgtttatatatttttcccggatttaaaattgaagtgcaacactaagtgttaaacaaaaaggccatgaagacctaaacttgaagtgacgaaaaatcaagaaaggaagatcttcatgaccaattcaaattctagcatttctaagcactatcatcaattaaccagcgtacaacgtggacaaattcaagcaatgctggattccggcataacttcccgtactgttatcgctcaagaagttggctgccataagtcgacaatcagtcgcgaaatcaaacgcggaagcgtcctgcaaagagacagcagctatttattgtatgagcactattacgctgatactgcacagatttattatgagaagcgtcgcaaaaactgctatcagcgcaatccattgaagcattatgctgtctttttgagaatgctctccagacgctttaaagctaaatttgatgccaccagcatcgatgagttcgttggtgaattcaaaaggactatgccaggctacccttgtcccagcacaccaaccgtctatcgctatattgatcagggcttgctggacataagcaatattgatctgcctatgaagctcaaaagacgcaggaacaagcgtcatcacagccatggcggtcacgctttgcacaagaagcatcttggcaattccattgaacagcgtcctaaggaggttgaagacagaaaagctccgctgcactgggaaggagatctggttaaaggcgtcagacgcaagaatcagcctgctttaatgactttgactgaaagaaccacacgctttgaagtagttatcaagattcctgactatcgggcaagcacatgccaaaggctgcttcaaaaggagattgacagacatcctgcctggtttaaatcaatcacgtttgacaatggctctgagtttgcggatatgaccaagatcaagggctgccagatttactttgctcacccatattctccatgggaaaggggcaccaatgagaactgcaatggtcttttgcgtcaattcttccctaagggcaagagcatgaaagacaagtcaaaagcttatgttcaacaggcaactgatgccattaaccacaaatatcgccgaatcctccaatatcacacagcagaggaactcttcaagcaatatatctcttcataacctaactgttgcacttaatttgacaattcagggtttatatattttttaattgagaatcattttttcatcagagtattttttaggatcatttaaatcccattgctgatatctaacttcttgacacttaaagcctaattttttgtaaagctttttggccttagtattttctgcaaatacatcaagactaactggtcgactcatgtatctcaaagctgtcgttgctaaagcatacccgatacctttattttgatgaattggatctacataaatgtaatccagttcttggggatgaactgcaacgaagcccaatatgctgtcagcatcataagctacataaattttgcaggagaaaaaatcatccttatatggagctgtctctaaaggtatgaagtatttttccgcaccaccaattgttagctcttctttacgactaacgtcgtgaatgcgacatacttcagcataatcgtttggttgatattctctgatattaaattttggcatgtttttctcgcttcctaatattaagattttgatttagaaagcaatagtacgtaatctcatgtgaaatctcctttaattaaattgaagatattatagcaatttttttaattcggtacaataactaaaattaacttagttaaaaacagataagtaatattttttcaaaaagtatttgcaaagagaataatctttgctataataatttttgtatcgcggaagtagttcagtggtagaacatcaccttgccatggtgggggtcgcgggttcgaatcccgtcttccgctccaagatgaagagctcacgaatgtgagctttttttgtgcctaaaataaatttatcttttttgataaaaaggtcttgcaaagaaaaatgtatttgctataataatatctgttgtcgcggaagtagttcagtggtagaacatcaccttgccatggtgggggtcgcgggttcgaatcccgtcttccgctccaagatagaaggctcaccaagtggtgagtctttttttacgggaaatagctcagtttggtagagcgctacgttcgggacgtagaggtcgccggttcaagtccgattttcccgatatacaagctatccgtttgggtagcttttttctttttgttataatatcttttaaaacttaaagggagattaaaaatgacggcaactactgaagaaaaatacaaattattagtggagcaagctagagctttgattgagggagaagatgattggattgctaatacagctaatttatctgctcttttgtttaattcgttaaatgatgtgaattttgcaggtgtttatcgctatgaaaatgatgaactgatattaggtccatttcaggggatgccagcatgtgttcatattcaaatgggaaaaggtgtttgtggtacggctgcacaagcaaaaacaacgcagattgttaaggatgtacatgaatttgctggtcacattgcttgtgatagtgcttcaaattcggaaatcgttgtcccaatttttaatcagggaaaactttggggcgtctttgattttgattcgaccaagctagctaattttgacgaaattgataaaaagtatttaactgaaatagcgaaagcaatttttgcgtaattattagaattggacataatgaagttgaagataagtcaaattgttttacttactgacaaaagaaaagtaaaataccataacgtattttaaagggtggtgtttgtatggaaaattcatatagtaagagcgttaatcaagtattgaaaattgcacgtgaacaagcacaaaattttcatcatcgcttgattggcacagaacatgttttattggctctagtaattgaaactgacggtgaagcaggaaaaatcttgcgttcatggggattaacaccaactgcagtacgtgaagaaattgaacgttatacaggttatggctctgcccctaaggcaagctacatggaaatgtcaccacgtttgagtttagctttggattatgctagaagacgagctaatgacgatggagttaaggaagttaacactaatcatgttttgctgggaattactgcaagtgagcaggttttatcagcaatgattttgaaaaacttgaatgttgatattcctcgtctgcagcaggatgttgaagacagtttgagtcaagaccaagactttggtgattcagctaattggctgggtgatgataacacgacgactggtcaaaagaagcgcaagagcactactcctaacttagataaggtagcggttaatttaaatcaacgtgtgcgtaatggcgagattgatccggtgattggccgtgaccaagaaattaagcgtgtgattcaaattttgtctcgacggactaagaataatcctgtcttagttggtgaaccaggagttggtaagactgctgttgctgaagcgattgcaactgagattgtcaacaaaaaagtgccacaggatatgcttaagaaacgggtaatggccttaaatttaggtagtttagttgctgggactaagtatcgtggtgagtttgaagacagaatgaagaaaatcctgaacgaagtcaccaaggatggcaatgtcattctctttgttgatgaaatgcatactttaattggtgctggtggtgctgaaggtgcaattgatgcttctaatatcttgaagccttcgcttgctcgtggcgatattcaaatgattggtgcaactacttttaatgaatatcaaaagtacattgaaaaagatcaagctttggcacgtcgttttcaacaagtgcgcttaagtgagccttcaagagatgacactttgacaattatgcgtggcttgaagtcgaaatatgaaaagttccatcatgtgactatttctgatgagagcttgaaggatgcagttgatttgtcaacgcgctatatttcggatcgctttttgccagataaggcgattgacttagtagatgaagctagtgccgcagttaagattcgtaataacattagcaatgatgctgagctagaaaaagttaatgagcaaattaagaaactgattacgcaaaagaatatggctgccgctagtcaaaactttgttaaagctgctcaattgcaggatgagcagaacaacttagaaatgcaacgtgaagcaatggtagagaagttagaagacaaagttagtgctaaagctgtggttgagccagaagatatcgctaaagtagtttccaactggactggcgtccctgttacccagatggaacgcaatgaatcacggcagctagctaacctggaaaagattttacaccaacgtgttattgggcaagataaggctgtttcagcagttgcccgtgctattcgtcgtagtagaagcgggattaaagatgaacgtcgtccgattggttccttcttgttcctaggtccaactggtgttggtaagacagaactagctaagtcagttgcagcagcaatgtttggctcggaagacaatttgattaggctagatatgtctgaatatatggaccaaattgcttcaagcaaattaattggctcggcaccaggctatgtcggttatgaagaaggcggtcaattatctgaaaaggttcgtcgtcatccgtactcggttattttgcttgacgaagtagaaaaagctcatccagatgtctttaacttgcttttgcaggttttagatgaaggatttttgactgactccaaaggtagaaaagtcgactttagaaatacaattataatcatgacttctaatttaggttctcgttcgctctttgataataaggcagtcggcttcaatgcagataatgcagatccagccaaggcgagatcagctaaagttgaacaagcaatcaaacaattcttccgcccagaatttttaaacagaatcgatgaaactattatcttcgatgaactagataagaagcagctgcgcaatattgtaactttgttaacgcacaagctggtagttcgtttgcaaaagaagggtatcgaattgaagctatcacgggcagcactggatcagattgcacaagatggttatgatccagaaaatggtgctcgaccattgagaagagcaattcaaaatgatattgaagacaagattgccgagatgctgattgtaggcgaagttaagtcaggcgacactttgaaaattggtagtcagcatggacatttaaaatttgaagtagttaatccgaaaaaagaaactgtaaaagtcaagtgatattggtgctataccttgacaaaatgctgaaaatatcatataatttttgctgatttaaaaagactgagattcaggattttgctgatctattgtccagcaaaatgataagggacaaaaacgacaattgttgtttttgtcttttttatgcctaaaattgcagttttttgaatttgtaacagaaatgtaatatttgctttcttagacagaaaggatgtttttccttgttaaatggacacgtagtgaactacggtaaacatcgaactagacgtagcttctcccgcattaaagaagtattgaagctgcctaacttaactgatgttcaaaccgaatcatataagtggtttcttgataaaggcattaaagaagtctttgacgacattatgccgattagcgatttctcaggtaagctttcattagaatatgttggctataaattgcaaaagccaaagtatacagttgatgaagcccgtaaccatgatgcaacttatgctgcaccaatgcacgttaccttgaaattgactaaccaagaaactggtgaaattaagactcaagatgttttctttggtgatttgccattaatgaccgaatcaggttcatttattgttaacggtgctgaaagagttatcgtttcacaattggtaagatcacctggtgtatattacactggcgattatgacaagaatggtcgtcaaatctttggtactactgttattcctaaccgtggtgcttggcttgaatatgaaaccgacgcaaagaacgtttcatttgttcgtgtagaccgtactcgtaaattgcctcttactgtattgattagagcaatgggtattggctctgacagtgacattattgatatgtttggtcaaagtgatactttgcaattcactttggacaaggatgttcataagaacccagctgactcacgtgtagctgaagccttaaaagatatctatgaaagacttcgtccaggtgaaccaaagactactgattcttcacgttcacttttgtatgcccgtttctttgatccacgtcgttacgatttagcacctgtaggtcgttacaagatcaataagaagctttcacttaagaaccgtttatacggtcaaactttagctgaaactttagctgatccagatactggggaaattgttgctaagaagggtactgtagttacccacgaagtaatggataagttagctccataccttgatcgtgatgactttaagatggtaacttaccaaccttcaaaggaaggcgtattaccagatcctattgcagttcaagaaattaaggtttactcaaaggtagaccctgaacgtgaagttaaattaatgtcaaatggtcatattgctgataacgttaagcatttgactccagctgatgttttagcttcaatcaattacttctttgcattgcaagatgaaattggtactactgatgatattgaccacttgggtaaccgtcgtattcgtcgtgttggtgaacttcttcaaaaccaatttagaattggtttggcacgtatggaacgtgttgttcgtgaaagaatgtcaatccaagatccttcaacagttactccacaacaattgatcaacattcgtccaattgttgcaagtattaaggaattctttggttcatcacaactttcacagtttatggatcaacataacccattaggtgaattgactcataaacgtcgtatgtcagccttagggcctggtggtttgacccgtgaccgtgctggttatgaagttcgtgacgttcactatactcactatggtcgtttgtgtcctatcgaaactccagaaggtcctaacattgggttgatcaactcacttgcttcatatgcgattattaataagtatggttttatcgaaaccccataccgtcgtgtttcttggaaggaccacaaggttactgataagatcgactatttgactgctgacgaagaagataattacattatcgctggtgccaacactccattgaatgatgatggttcatttaaggagaagttgatcttggctcgtcaaaaggaagataacgtcgaagtttctccagataagattgactacatggacgttattcctaagcaagttgtttctgtcgcttcagcatgtattccattccttgaaaacgatgactctaaccgtgctttgatgggtgccaaccagcaacgtcaggctgcaccattaattaatccgcatggttcacttgttggtactggtatggaataccgtgctgcacacgattcaggtgctgctttaatcgctaaggctgctggtgtagttgaatacgttgatgctaatgaaatccgtattagacgtgaagatggtactttggacaaatacacacttgaaaagtaccgtcgttcaaataactctaagtcatacaaccaaactcctaatgttaaattaggtgatcatgttgacaagagtgatgtaattgctaacggtccaactatggatcatggcgaacttgctttaggtcaaaacccattgattgccttcatgacttggaacatgtacaactatgaagatgccatcatgctttctgaacgattagttaaggatgatgtttatacttcaatcagtattgaagattatgaatcagaagctcgtgacactaagttaggtccagaagaaattactagagaacttcctaatattggtgaggatgctttgaaggatcttgatgctgatggtatcgttcgtgttggtgcagaagtccacgatggcgacattttggtaggtaaggtaactcctaagggtgtaactgaattatctgctgaagaaagattacttcacgctattttcggtgaaaaagctcgtgaagttcgtgatacttcacttcgtgtaccacacggtggtggcggtattgttcaagacgttaaggtttatactcgtgaagccggcgatgaactttcaccaggtgttaacacaatggttcgtgtttacatcgctcaaaagagaaagattcaagttggggacaagatgtctggtcgtcacggtaacaagggtactgttgctgcagttgttccagaagaagacatgccatacttaccagatggtactccagtagatatttgtttaaacccaatgggtgttccatcacgtatgaacatcggacagcttcttgaattgcacttaggtgcagctgctcgtcaattgggcattcacgttgcaacaccagtatttgatggtgctgacgaaaatgacgtttgggacacagttcgtcaagcaggtgttgataaagatggtaagaccgttgtttatgatggtcgtaccggtgaaccattccacaaccgtgtatctgtaggtgttatgcactacttgaagttgacccacatggttgacgacaagatccacgcacgttcaattgggccttactcattggttactcaacaaccacttggtggtaaagcacaatttggtggtcagcgttttggtgaaatggaagtttgggcccttgaagcttatggtgctgcttacacattgcaagagattttgacttacaagtcagatgacgttgttggtcgtgtaaaggcatatgaagctattgttaagggtgaaaagattcctaagccaggtgttccagaatcattccgtgttcttgttaaggaacttcaatcattaggtttggatatccgtgttcttgatatgaaccataatgaaattgaacttcgtgatatggatgaagactcaagtgaacacttgaacatcgatactttgtcacggatggcagaagagcaagaaaagaagaagttagccgaagaaactggaaaatcagaagataaagacagtaaagaaaatgcagataagccggtagctcctgcagatgagtctgacgataaagtttctaaatagtaggaggttaaacttttgatcgacgtaaataagtttgaaagtatgcaaattggtcttgcatcacctaacaagatcagaagctggtcatatggtgaagttaaaaagccggagaccatcaactaccgtactttaaagcctgaaaaagatggcttatttgatgagagaatttttggaccaacaaaagattggtcatgtgcttgtggtaagtacaagggcgttagataccgtggtatcgtttgtgaccgttgtggtgttgaagttacttcttcaaaggtaagaagagaacgtatgggtcatattgaattggctgcacctgtaactcacatttggtactttaagggtatcccatcaagaatgggattagttttggacatttctccaagattacttgaagaagttatttactttgctgcatacattgtaattgatccaggtgatactgaccttgaacctaagcaattattaactgaagctgaataccgtgaacaaaaagctaagtacggtaaccgttttgaagctaagatgggtgctgaagctgttcgcgaattgcttaagaaagttgaccttgataaagaagttaaggatttgaagaaagaacttcaaactgccactggtcaaaaacgtacgcgtgcaattagacggttagatatcttggatgccttcaagaattcaggtaacaagcctgaatggatggtaatggatgccgttccagtaattccaccagatcttcgtccaatggttcaacttgaaggtggccgttttgcaacttcagatttgaacgatttgtacagacgtgtaatcaaccgtaacaaccgtttgaagagattgcttgatttgaacgcacctaatattattgttcaaaacgaaaagcgtatgcttcaagaagctgttgatgctttaattgataacggtcgtcgtggtcgtccagttgttggaccaggtaaccgtccattgaagtcactttcacatatgcttaaggggaagcaaggacgtttccgtcaaaacttgcttggtaagcgtgttgactactctggtcgttcagttatcgatgtttcaccaaaattgaagttctatcaatgtggtgtgccacgtccaatggctttggaattgttcaagccatttgtaatgcatgaattagttaaacgtggaattgcatcaaacatcaagaatgctaagcgtaagattgaccgtgaagatgacgatatctgggatgtacttgaagatgtgattaaggaacgtccagttcttttaaaccgtgcacctactcttcaccgtttgagtattcaagcctttgagccaatcttggtaccaggtaagtcaattagacttcacccattagcttgtgaagcctacaatgccgacttcgatggtgaccagatggctattcacgtaccactttctgatgaagctgttgctgaatcaagattgttaatgttggctgctcaccacattttggctcctaaggatggtaagccaattgttactccatcacaggatatcgttttgggtaactactggttaactcaggccgaacgtggtcgtgaaggtgaaggtatgatcttcagctcaccagcagaagctgctgtagcttacgaaaatggcgatattcactaccataccattattggtatgtctgcagatgctatgcctaaaaagccatggcctaagggacatgaacacggcatctttattaccacttatggtaagattgtcttcaatcaattgttcccagatgattacttctatatcaatgaaccaactgaagagaacttgaacaatccgttggatgctaagtacttcttaggtgaaggcgaagagattgataagaagatcgatgaagtaggcgatgatttaatcgctagtccatttaagggaagcttcttgtcagattctattgctactatttacaagtattacaaggttcaaagaacttcagaatacttggatgatttgaagaagttaggctacactagctcaactacttcaggtattactattggtatgactgacgttccagaaatccaagataaggatgaaaaggtagccaaggcacgtaaacaagttgatgttgtttctaagcaatttagacgtggtttgattactgaacaagaacgtcacgaccgagtaattagtatttggaatgcatgtaaggacaagatccaaaacgaaattgcacaaattcacgcacctcgtaatccaatttcaatcatggcagactcaggtgcccgtggtaacatttctaactttactcagttagccggtatgcgtggtttgatggccactcctaacggtggtttgttcgaaattcctgttacttcaaactttaaggaaggtttgtcagtattggaattgttcatgtccactcacggtgctcgtaagggtatgactgatactgcattgaagactgctcagtcaggttacttgactcgtcgtttggttgatgttgctcaggacgttattattcgtgatgacgattgtggtactgatcgtggtattacagttagtgccatcatggaaggtgacgaaatgatcgaaccattatttgaccgtttggttggtcgtttcactgctgagactgttaaagatcctgaaactggcgaaactattgtcggcagagatgtcatgatggatgaaaacatggcacacaagatttgtgatgcaggtgtaactcacgttaagattcgttcaattcttacctgtgatactcctcacggcgtatgtcgcaagtgttacggtatgaaccttgctactggtgaagaagttgaagttggtgaagcagttggtactgttgctgctcaatcaattggtgaaccaggtactcagcttactttgagaactttccacaacggtggtgttgccggtgctgaagatatcactcaaggtttgcctcgtgtgcaagaattgtttgaagcacgtaaccctaagggtcgtgcaaccatttctgaagttgatggtgtaattgattcaattcaagaaaacccagcagaacatactcgtgaaattactgttaagggtaagattgatactagaagctacagtgttccttatacagcttcagttgctgttagcgaaggtgactacgttcatcgtggtgacaagttaactcttggttctgttgatcctaaggaattgattcaagttactgatacattaactactgaaaagtacatcttagctgaagttcaaaaggcttatagaatgcagggtgtagacattgccgacaagcacgttgaagtgttaactcgtcaaatgctgcaaaaggttcgtgtccttgatccaggtgaaactgacatcttgccaggtgaagttatggatattggtcaatttagagaccgcaacaaggaagttattatttctggtggtattccagcaactgctcaaagcgttatcttgggtattactaaggctgctttggaaactaacagtttcttgtcagctgcttcattccaggaaaccacacgtgttcttactgatgcatctattagaggtaagaatgatccacttcttggacttaaggaaaacgttattatcggtaaaattattccagctggtactggtatgcctgtataccgcagcatggaacctgaagctgacgttaagaagccagattcagtatactcaattgctgatattgaaaagcaaatgaaagaaaaggataaatctaagcaagactaagctttattgaaaataaataagcatttccaatcttttaagagcgggaatgcttatttttttgtctaaaaaattaattgggttagtactaatcctaggaaaatatatggaataaatggatagcgatggttaataggagttttttcaataagaaaaattgcaattaccaagattgaagcaaatagaaaaactaaattggcaaatgatggggtgaagtagcaagcgataattaagtaaattaataaatcgcctagccccatttttctttgcattatgctatagctaaaaattcctagcaataatgtaaaagagatccagtcgattaatgtaaaagctgcaaattggttgaataaaatcgcaacgctaatggctggaattagtaggagaagatcaaattcttgcttttgataatcagagattgcaacgactaaaagcgaaaaaagcaaaatagcggtaataatgtcctgtgtcttactaaaatcgagtaaacaaaaggcaaagccgccaattaattcaaataaaaataattcaactggaatttgttgataacaataacgacattttccttgaagaaaaagataagataataatggaatttcatccaaaattgataattcaaggtgacagttgttgcactgagaacgtgagtaaataaaatttttatcattccagtgctcgtaaactactgctgcgtgagaagccaagcaacttccaattataaagttagtaaaaataaataagtatttcaaaaaaacacctccactatttattacgcaaaaatagccgatttttctttttttattttgaaaaagtttgctttctgcttaaaaccgagtacaatagtctttgtatgttttgaacagtctattcgtgagtaaaaaagaaactcccggatgtgtgaacaaaatagtattttaggaggaaaaattaatgccaaccattaatcaattggtaagaaaaggccgtcattcaaaggtcactaagtcaaagtcacctgctttgaattacagctacaacagtatgaagaaggaatcagtattcaacccagctccacaaatgcgtggtgttgcaactcgtgttggtactatgactccaaagaagcctaactcagctttacgtaagtacgctcgtgttcgtctttcaaacttgatcgaagttactgcttacattccaggtgaaggccacaacttgcaagaacactcagttgtattaatccgtggtggtcgtgtaaaggaccttcctggtgtacgttatcacatcgttcgtggtgcccttgatactgctggtgttgatggcagaaagcaaagccgttctaagtacggtactaagaaagattaaaggaggagttaaataatgcctagaaaaggtcacgtaactaagagagacgttttagcagatccagtttacaactcaaagcttgttactaagttgatcaaccacttaatggtcgatggtaagagagctaaggcatcttcaatcctttacgatgctttcagcattgttcaagacaagactggtaaggaaccacttgatgtatttgaagaagctatgaacaacgttatgccagttttggaagttagagctcgtcgtatcggtggttcaaactaccaaatcccagttgaagtacgtcctgaaagaagaactactttaggtttaagatggcttgtttcatacgctcgtttacgtaacgaacacactatggatgaacgtttagctaacgaaattatcgatgcttcaaacaacactggttcagcagttaagaagcgtgaagatgttcaccgtatggctgaagctaaccgtgcatttgcacactaccgcttctaatttgttcgttttaatttaaggagagaataatttatggctaacaagcgtgaatttccattagcaaagacacgtaacatcggtattatggcccacatcgatgcgggtaagactactactactgaacgtatcctttactacactggtaagatccacaaaattggtgaaactcacgaaggtgattcacaaatggactggatggatgaagaaaaggaacgtggtatcaccattacttctgcagctactactgcacaatggaaagaccacagaattaacatcatcgacaccccaggacacgttgacttcactatcgaagtagaacgttcacttcgtgttcttgatggtgccgtaactgttcttgatgcccaagctggtgttgaaccacaaactgaaaacgtatggcgtcaagctgaaacttacggtgttcctcgtattgttttcgttaacaagatggataagatcggtgctgacttcgataagtcagttaagtcattgcacgaacgtttaaacgctaatgcccatgctgttcaaatgccaattggttcagctgacacttttgaaggtgttatcgacttaatcaacatggttgccgacatctacgacgaagataagcttggttctaagtgggatactgttccagttcctgacgaatacaaggaagaagctgaagcacgtcgtaacgacttaattgaagccgtagccgatgttgatgacggcatcatggaaaaattccttggcggtgaagaaatttctaacgatgaattaaaggcagctatccgtaaagctactttggacttgaagttcttcccagtttacgctggctcagccttcaagaacaagggtgttcaaatgatgcttgacggtgttattgactacttgccatcaccacttgacgttaagccttacgttgctcacaatcctaagactggtgatgaagttgaacttatggctgacgataagaagccatttgcagctcttgcatttaagattgctactgacccattcgtaggtcgtttgactttcatccgtgtttacaccggttctcttgaatcaggttcatacgtattgaacgcttcaaagaattcacgtgaacgtgtaggtcgtttgcttcaaatgcacgctaactcacgtactgaaattccagaagtattctcaggtgacatcgctggtgctatcggtttgaagaacaccactactggtgactcattaactgacccagatcacccacttattttggaaagcttgaaagttccagatccagttatccaagtatcagttgaacctaagtcaaaggctgaccgtgataagatggacgttgctttgcaaaagcttactgaagaagacccaactttccgtgctgaaactaacccagaaactggtcaaaccttgatttcaggtatgggtgaacttcaccttgacatcatggttgaacgtatgagacgtgaatttaacgttgatgctaagattggtgaaccacaagttgcttaccgtgaaaccttcaccaaggaagctaaggcacaaggtaagtttgttcgtcaatcaggtggtaaaggtcaatacggtgacgtttggattgactttactcctaacgaagaaggtaagggttacgaattcgaagatgccatcgttggtggtgttgttcctcgtgaattcattccttcagttgaccaaggtttacaagaagctatgaagaatggtgttcttgcaggttacccattgatcgacgttaaggctaagctttacgatggtagttatcacgaagtcgactcatcagaagctgccttcaaggttgctgcttcacttgctttgaagaatgctgcttcaaaggctggcgcagttatcttggaaccaattatgaaggttcaagtaactactccagaagaatacttaggtgatgttatgggttcaatcactgctcgtcgtggtaccatggaaggtatggaagacagagccggtgctaagatcatcaactcatttgttccactttcagaaatgtttggttacgcaactactttgcgttcatcaactcagggtcgtggtacatttactatggtatttgatcactactcaccaacacctaaatcaattcaagctgacatcattaagaagcgcggcggagatgctgaatagcttccgttaagaactgattaatgcagttagcttaattgaaaacaatttcatataaaaaagagttatcatttttattttgataactctttttttgtaaataaatttaagaaaaaagtcgtaaacccttgatatttaaggagggacaaagtacaatagtctttgtgcttatgggacagtgtgcccttaagtgtgaaaatcgttgtaaagcgttgacgcaaaaggttgcggcacgccaggctgcattgccacagtggcgtgcggggaatttttgccgagcgagtcatcttttaaagaagacgttaaggaggtaatttaatggcaagtcaaacaattcgtattagacttaagtcttacgaacatggtattctcgatgaatcagctgctaagatcgtagctactgcaaagagaactggtgctgaaatttcaggtccagttcctcttccaacagaaagaactttattcacagttcttcgttcaccacacaagaacaaggactcacgtgaacaattcgaaatgcgcactcacaagcgtttaatcgatattttgaatccaacaccaaagactgttgattcattaatgaagcttgatcttccaagcggtgtagacatcgaaattaaactgtaatttaaatagaaagaggtgtaaacatgaccaaaggaatcttaggaagaaaagttggtatgactcaaatctttactaaagatggtgtccttgttcctgtaactgttgttgaagcaactcctaacgttgttatgcaagttaagactgttgaatcagacggttacgaagcagttcaattaggttaccaagacaagcgtgaagttttgagcaacaaaccagaaaaaggtcatgctgataaagcaaagacttcgcctaagcgcttcattcgggaaatccgcggtgttgagcttaaggactatgaagttggctcagaagttactgtggatacatttaaggaaggtgacgttgtaaacgttactggtacttcaagaggtcatggataccaaggtaacatcaagcgttggggccaatcaagaggaccagaaactcacggttcaagataccacagaattcctggttcaatgggttccatcattaaccgtgtaccaaagggcaagcgcttgccaggtcacatgggtgtgaagaaagttaccattgaaaacttagtaattgaaaaagttgttgcagacaagaacgtattgatgattaagggtaacgtcccaggtgctaagaactcattaatcgttgttaagactgcttctaaagctgtaaaggctgataaataggaaggaggactagaatggctaatttaaaagttatggatcaaaacggtaaagactctggtgaagttactttaaacgataaggtttttggtattgaaccaaatgaaagtgtcgtttttgaagcaattattagacaaagagccggcaagcgtcaaggtacctcaaaggttaagaatagatctgctgttcgcggcggtggtaagaagccttggagacaaaagggtactggtcgtgctcgtcaaggttctatcagagctccacaatggcgcggtggtggtacagtctttggcccaactccacgttcatacgcatacactatgccaagaaagcaacgtcgtttggctattaagtcagttctttcccaaaagttgattgacaatgatttaattgttttagataagttgactatgtcagctcctaagactaaggaattagtatcaatgttaaacggcttaaatgctgacggtaaagttttaattgtttcagatgataacaatgtacaactttccgcaagaaacttgactaaggttaaggttgttccagttaatggcttaaacgttgaagatgctgttaactatggcaagttgatcttagatcaagatgctgttaagaagatcgaggaggttttggcttaatggacgcacgcgatatcattttaagacctgtcattactgaaaagtccacgaacttaatggatgataagaagtacacattcgacgtgcttttaactgcaaccaagacacaagttcgcaatgctgttgaagaaatcttcgatgttaaagttaagaacgtaaacattatgaacgttcgcggcaaggacaagcgagtaggtcgttacactggtaagaccgctcgtcgtagaaaggctatcgttactttaactaacgattcaaacgacatcaagattttccaagacgataacacagaagacaacaagtaataggaggtcagtcaattggctattaagatttacaagccaaccacgaatggtcgtcgtcatatgacttcttccgactttgctgagatcactaagacaaagcctgaaaagactttacttgaatctcaatcacatactgcaggtcgtaactcatatggtcatatcactgtaagacaccgtggtggtggtcacaaacaaaaataccgtatcatcgactttaagcgtaacaaggacaacgcaaaggcagttgtaaaggctatcgaatacgatccaaacagaactgctaacattgctttgcttcactacactgatggtatcaaagcttacatcttagctcctaagggcttaaaagttggcgatgtagttgaatcaggtgattcagttgacattaagccaggtaacgctttggaattaaagaatatcccaactggtacttcaattcacaatatcgaattaaagccaggcaagggtggccaactcgtaagaagtgctggtgcttcagctcaagttttaggtgctgatggtgattacactttagtaagattacaaagtggtgaagttcgtaagattttgtcatcatgccgtgcaactatcggtactgttggtaatgaacaacactcattgattcaattaggtaaagctggtcgtaaacgttggttgggcaagcgtccacaatcacgtggttctgtaatgaaccctaacgatcacccacatggtggtggtgaaggtaaggctccagttggtcgtcctcaacctatgactccatggggtaagaaggcacgtggtattaagactagagataccaagaaggccagcgagaagttaatcattcgtcaccgtaaaggtagcaagtagtagaaggagggttaattaatgagccgtagtattaaaaaaggtccttttgctgatgcatcattgttaaagaaggttgatgcacaagcagatgcagataagaagcaagttattaagacttggtcacgtcgttcaactattttcccttcctttgtaggtttgactatagctgtttacgatggtagaaaacatgtcccagtatatgtaactgaagacatggttggtcataagttaggtgaatttgttccaacaagaactttccacggacacaaatccactgatgataaagccacaacacaagcttagaggaaggagaaacatctaaatggcagaacaaattagttcagctaaggctgaagcaagaactgttcgcatcgctccaagaaaagctcgtttagtcgttgacttaattcgtggcaagagcgttgctgaagcattagcaatcttggaatttacgcctagagctgcttccccaatcgttgaaaaagttttacgttcagctattgctaacgcagaacataactacgatcttgaaagtgcaaacctttacgtatcagaagcttacgtaaatgaaggtgcaactttgaagagattccgcccacgtgctaagggtatggcttctccaattaacaagagaaccagtcacgtagttgtagtagtttcagaaaagaacgattaagggaggtatattaatgggtcaaaagattaacccaaacggttttcgtctcggtgttatccgtgattgggaatcaaaatggtatgctgacaagggatacaaagaaactttaaatgaagaccttcaaatcagaaaatttatttcagaaaagttgaaggatgcctcagtatctactgttgaaattgaacgtgcagccaacagaatcaacatttcaattcatactgctaagccaggtatggtaattggtaaaggtggttctgaagttgaagctttgagaaaacaattaaatgctttaactggtaagcaagttcacattaatattgttgaaattaagaaaccagatcttgatgctaagttagtagcagatagtattgctcgtcaacttgaagctcgtattgctttcagacgtgctatgcgtcaagctactcaaagagctatgcgtgctggtgccaagggtattaaggttcaaacttcaggtcgtttgaacggtgccgatatggcaagaagagaatggcacacagaaggtcgtgttccattacaaactttgagagctgatattgattacgcttgggtaaatgccttcactacttatggtgaaattggtgttcaagtttggatcaaccgtggcgaaatcttacctactcgtaagaataagccagcttcaaagccagcgaagggaggaaatagataatgcctttagtaccaaagcgagtaaaacaccgtcgtgaattccgtggtaagatgcgtggtgctgctaagggtggtaaatatattgcctttggtgaatatggtcttgaagccctcgaatcacattggattactaaccgtcaaatcgaagcagctcgtgttgctatgactcgttacatgaaacgtggcggtaaggtttggatcagaattttccctcaaaagtcatacactgctaaaggtgttggtgtacgtatgggttcaggtaaaggtgcaccagcaggttgggtagctgtagttaagagagaaaagattatgttcgaaattggtggtgttgatgaagcaactgctcgtgaagctttacgtcttgcttcaactaagttaccaattaagactaagtttgtaactagaagttcggaagtaggtggcgaatctaatgaaggctaaagatatcagagcattaaccactgatgaaatgttagaaaaagaaaagcaatacaaagaagaactcttcaatttgcgtttccaacaagcaacgggtcaattagaaaataccgctcgcttgagcaaagtccgcaagaatatcgccagaatcaagactattctgagcgaaaaagcgttagaaaacaattaatggaagggagctattaacttgagcgaaacaaacgaaagaaatcgtcgtcacgtataccaaggtcgtgtagtttctgataagatggacaagactatcgttgtagttgttgacacttacaagaaccaccctgtttacaacaagcgtattagatattcaaagaagtactacgcacaagacgaaaataacgaagctaaagttggcgatactgtacgtatcatggaaacccgtccattatctcgtaagaagcgcttccgtttagtaaagattgttaagaaatctgtttaatttgcggatttagtgaggggaggattacacagtgattcaaaacgaatcccgtttaaaggttgctgataactctggtgccagagaacttttagttattagagtcttaggtggttcaaagcgtaagaccggtaacattggtgacatcgtagtatgtactgttaaacaagcaacaccaggtggcgttgtcaaaaaaggcgacgttgtaaaagctgttattgttagaactaaatcaggtgcacgtcgtgaagatggttcatacatcaagttcgacgaaaatgctggcgtaattatcaacgcagacaagagcccacgtggtactcgtatctttgggccagttgcacgtgagttacgtgagaacgactttatgaagatcgtctctcttgctcctgaagtcttataattgatagtgaggtgcactgatgttcgttaaaactggtgacaaagtaaaagttattgccggaaaagataaaggtaaagaaggtactgttctttctgttaacgttaagaaaaaccgtgtagtggttaagggcgttaacaagattaagaagcaccaaaagccttcacaaagcaatgctaatggtggtgtagttgaatcagaaggttcaattcacgcatcaaacgttaaagtaattagtagtaaaaaagaagataagtagaagggaggacacacatggcaagttatttagctaaggaatacaacgaaaaggtagctcctgcattagaagaaaagtttaactacaagtcatctatgcaagtacctaagatcgacaagattgttttaaacatgggtgttggtgatgcagtttctaacgccaagaacttagatgaagcagttgaagaattaactttgatctcaggtcaaaagccattaatcactaaggccaagaaatcaatcgctaacttccgtttacgtgaaggtatgtctatcggtgctaaggtaactcttagaggcgacagaatgtacgatttcttgtacaagttaatcaatgtttctcttccacgtgttcgtgacttccgtggtgtatcaactcgttcatttgatggtcgtggtaactacactttaggtattaaagaacaattgattttcccagaaatcgattttgataaggtaaaccgcactagaggtttagatattgttatcgtaactactgccaacactgatgaagaagctcgtgaacttttgactcaatttggtatgccgtttgcaagatagtggaggacattaatggctaaaacatcacaaaaaatcagaaatcgtcgtcctgctaagttctcttcacgcgaatatacacgttgcgagagatgtggtcgtccacactccgtataccgtaaattcgggttatgccgtatttgcttaaaggaattagcacacaagggtcaaatccctggtcttaaaaaggctagttggtagtatacggttaggaggatagcttaaatggtcatgacagatccaatcgcagattacttgactagaatcagaaatgccaacatggcaaaacacgattcagttgaaattcctgcatcaaacattaaaaagtctatttcagaaattttgaaacgtgaaggcttcatccgtgattacgaagttgcagatgataacaagcaaggcgttatcaaggtattcttgaaatatggtccaaatggagaacgtgttatctcaggtttgaagcgtatttctaagccaggtcttagaaactacgttggcgctgaagacttacctaaagttcttaatggcttaggcattgccatcgtttctacttctgctggtgttattaccgacaaggaagcaagacaaaagaacgttggcggcgaagtaattgcctacatttggtaatactgacagaaaggagaacaatcaatgagccgaatcggtttaaagactattgaagtccctgacagtgtcactgttaccaaggaaggcgacaatattactgttaagggcccaaagggtgaattaactagatacttcgatccaaagattaagtttgaacaaaaagatggtgaaattaacttttcacgttcaagcgaaagcgacaaagcacttcacggtactgaaagagctaacttagcttcaatgatcgaaggtgtagttgacggttataagaagactttgaagttaatcggtgttggttaccgtgcacaagcacaaggcaacaagattactttaaatgttggttattcacacccagttgtattgactgcaccagaaggtgtttctgtaaaggcaacttcagcaactgatgtagaagttgaaggtgtttcaaagcaagatgttggtcaatttgcagctgaaatccgtgccgtacgtccaccagaaccttataagggtaaaggtattcgttatgttgatgaatacgtacgtcgcaaggaaggtaagactggtaagtaataagtagttatttttgaggtgaaattgtgatttctaaaccagataaaaacaagttacgcttaaagcgtcatagacgtattcgtggaaaaatttctggtactgctgagcgcccacgcttaagcatttttcgttcaaataaaaacatctacgctcaattaattgatgacgtagcgggtgttacgcttgcaagcgcctcaactttggatgaaaatgtatcagatgcaactaaagtagaacaagctgctgctgtaggtaaggcaattgctgaagctgcaaaggcaaaggacatttctactgttgtattcgacagaagtggttacttataccacggccgtgttcaagcattagctgatgctgctcgtgaaaacggattagatttctaggaaaggagaattaacacatggcaaaccgcaatgattctcgtaacaatcgcagaaacaaagacgatatcgaagatcaattagtcgctgtcaaccgtattactaaggttgttaaaggtggccgtcgcatgagatttgctgctcttgttgttgttggcgacaagaaaggccgtgtaggttttggtactggtaaagctcaagaagtcccagaagcaatccgtaaggctgtagaagacggtaagaagaaaatgatcaatgtacctaaagttggtactactattcctcatgaagttattggtcactacggttcaggtaacattttattgaaacctgctgaagctggttctggtgttgctgctggtggtgccgtacgtatcgttatggatatggctggtatctcagacgtaacttcaaagtcacttggttcaaacactccaattaacgttgttcgtgcaactatcgatggtttgaagaagcttagaactagtgaagaagttgcaaaacttcgtcaacctgaaagagcttaagattagggagatcatagatgactgatttaaagattactttaattagaagtgttgctcaccgtctacctcaacaaagaaagatcgttaaagctcttggtttaggtagagtggatagtactgttgttcttccagacaacgctgctactcgtggtgcattattaaagattgctcacttaatctctgttgaagagattaacaaatagaatatcaaggaggtgccaaattaatgaagcttcatgaattacattctgctgaaggctcacgtcgcaatagaaaacgtgttggtcgtggtacttcaagtggttacggtaaaacttcaggccgtggtcaaaagggtcaattagctcgtcaaggcggtcatactcgtttaggttttgaaggtggtcaaatgccattattcagaactatgcctaagcgtggttttaagaacattaaccgcaaggaatatgcaattgtaaacttagatgatttaaacaagttcgaagacggcagtgaagtaactgtagaatcacttaaagataatggcttagtaaagaaagaattgtcaggtgttaagttacttggcaagggcgaattaaaagttaagttaactgtaaaggttaataaagtttccgcatctgctaagcaagcagttgaagccgctggcggaactgttgaggtgatctaatgttttcgaccttgaagaacgccttcaaagataaagaaattagaaataagctctatttcacgctctttattcttttgctgtatcggatcggtgcaaacattaccgttcccggtgttaatgcgaaggcgatcacgcaggttgcgcaaactggtttagttccaatgctggatactgtatctggtggtggactagataactattcaatattttctttgggtgtttctccttatattacggctcagattgttatccagctgctacagatggatattgttcctacgttagtagaatggggaaaacaaggtgaagtaggtcgacgtaaaacaaatcaagtaactagatatttagcattagttgttgcttttatccagagtattggtattacgttaggctttaacgctttaactcaaatgggtttggtaaagaatcaaacaccacagacttatatagaaattgctattgttatgactgctggaactatgttattaacatggttgggtgatgaaatcactgataagggtctaggtaatggtatctcagtaattatttttgctggtattattgcaagactaccaagtggtctatggcaaatttataaggaagaaattattaataatagtgctagtgatcgttggcaaggcattttgttcttcatcgcggttatagttgcaatccttatcgtaactcaatttgttacatgggttgaacaagctgatcgtcgtattccaattcaatatacgagaagagcgacgatgagtggttctgaaagttttctaccattaaaggttaatgtatctggagttattccggttatttttgccagttcatttattgttacaccggcaacgattttaatggcctttcaaagaacccagggcgatcaacaatggtttaaagtaatgaaccaaatctttagcttacaaactactcctggggtaattatctacactcttttaattatcttatttacattcttctacgctttcgtacaggtcaaccctgagaagctagcagaaaacttacaaaagcagggtgcttatattcctagtgtatggccaggaaaagatactcaggattatatttcaaagatgttgatgaaattatcaacagtaggttcattattcttgggcttagttgctttactgcctcaattggctactaacttttggaatctcccaagttccattggtttaggaggaacaagtcttttaattgtgattggggttgttctcgagttatctcgtcaaattaacggcttgttaatgaagagagaatatgttggattcatcagataggaacggataaatgattaacttaattcttttagggttaccaggtgctggtaaaggtacagcatcagagcgaatcgttgataaatatcacttaactcatatttcaactggggatatgtttagggaagcaatggctaacaagacgaaggttggtcttgaagctaagagttatatcgataagggtaatctagtacccgatgaagttactgcaaagttggttgaggaacgtttaagtcaacctgatattaaagaaggttttatcttagatggttttccaagaaccactgtacaagcagaacttttagatggtattacaaaacgtttggagaaacctttaacaaatgtcattgcgcttgaagttgacgaagacactttgattaagcgtttatcagcaagatacatgtgtaaaaattgtggagctacttacaacaagctttccaagcagccaaaagttgagggcacttgtgatcgctgtggtggccatgaattttatcaacgtgaagatgataaaccagaagttgttaagaatcgtcttgaagttaatgaaaagatgaatgcacctttgaaggacttttatcagaagaaaggcttgctcactgtaattaatggtgaacaaactccagaaaaagtctttgaagatattgatgcggtattgagtaataatcaatagaagaaaaatttgtataattttttatccgtgttataatttcaaagtatatgactgtttaattgcggaggaacaactttggcaaaagatgatgtcattgaagtagaaggtaaggtagttgataccttacctaatgctatgtttaaagttgaattggaaaatggagccacaattttagcacacgtttctggtaaaattaggatgcactacattcgtattttgccgggagaccgtgtgactgtggaattatctccatatgatttaactaaaggtagaattacgtatcggtttataaagtaatataacggagggaaacatgaaggttagaccatctgttaaaccaatgtgtgaacattgtaaagttatcaagagacatggccgtgtgatggtaatttgctcagcaaatccaaagcacaagcaacgtcaaggttagaaatagagggggtgtagtttatggctcgtattgctggtgttgacttaccaagagataaaagaatcgttatcgctttaacttacatttacggtatcggtgaagcaactgccaagaaaatttgtgcttatgctggagtatctgaagatattcgttcaaaggatttaactccagaagatcaagaaaagcttcgtgctgaagttgacaagtaccgtgttgaaggtgacttacgtcgtgaagtaagcatgaacattaagcgtttagttgatattggttcttaccgtggtattcgtcaccgccgtggacttccagttcgtggccaaaataccaagaacaatgctcgtactcgtaagggtactaagagaaatcgttaattttatttataaggaggtttattgatgcctgcaaagaaaacagcacgtaagcgtcgtgtgaagaagcatgttgaaagcggtgtagcacacattcactcaacgtttaataatactttagtcatgattactgacgttcaaggtaatgcagttgcttggtcttcagctggtgcattgggctttaagggtagtcgtaagtctactccatttgcagctcaaatggcagctgaagcagcagctaagagtgcaatggaccaaggcatgaaacatgtagaagtttcagttaaaggtcctggtgctggtcgtgaatctgctattagatcacttcaagcaactggtcttgaaattactgcaattcgtgacgttacgccagttcctcacaatggttccagaccaccaaaacgtcgtcgtgtttaattttgtccttgatataggacgtaacgttttgaaaggggcccagtaatgattgaatttgaaaaaccaaatattaccgttgttgaacaagaagattcttacggtaagtttgttgttgaaccacttgagcgaggctttggtactactttaggtaattctttaagaagagtattacttacttctattccaggtactggacttgtttatgtgcaaattgatggcgttttacacgagttctcaacagttcctggcgtcagagaagatgtaaccaagatcatcttgaacttgaagaaacttgaattaaagtctctttcagatgaacaaaaggttattgaattggacattgaaggtccagccacagtaactgctgatgatcttaaagttgatgcagacgttcaagtcttgaatccggatcaatatatttgtaccattgctgaaggtggacacttgcatatggaacttgccgtaaagaatggtagaggttatgttgctgcaagtgacaataagagtgatgacatgccaatcggagttatcccagttgactctttattctcaccaattaagaaggttaactaccaagttgaatcaactcgtgttggtaagagagatgactttgataagctcacttttgagatttggactgacggttcaatcaagcctaatgacgcccttagttttgctgctaaaattttagttgaacactttaaggtatttgaatcagcagatgcaaatgctaaattcagcgaagtaatggtggaaaaggaagacgataagaaggaaaagaagcttgagatgactatcgaagagcttgacctttctgttcgttcatataactgcctgaagcgtgctggcattaatactcttcaagagttaactgacaagacagaatcagatatgatgcgtgtacgtaacttaggacgtaaatcattggaagaagttaaaaataaattaaccgacttaggtctttcacttcgtcaagaagactaagcttaggtgaataaaggaggcaaatccatggcataccgtaaattaggtcgcgatagtgctcacagaaaagcaatgcttagagaaatgactactcaattaatcatgaacgaacgcattgttactactgaaactcgtgctaaagaagttcgtaagactgccgaaaagatgatcactttaggtaagcgcggcgatttagcagctagaagaaaggctgctgcatttgtacgtgacgaagttgcagatgttcacgaagaaaaagatgcagttgttgttaagtcagcattgcaaaagcttttcagtgatgtagcacctcgttacaaggaccgtaatggtggttacaccagaattttgaagttagccgttcctcgtaagggtgacgctgctccaatggttattcttgaattagtttaatttagagtaacacaacttaatacgtattaagaattatccatgaaagtgagaataagcgtaaagatgatggcgcaagcttagtctagcttagatgataaaaatcatccctcttcatgggtgattttttttgctctttttttctgttacaattgctaataagcgatttaagaaaggaagtggaaaaatgccagtagatagtgctgttgaatttaaggatgtctcatttacctatcccgatactaaaaaagcgattcttgatcagattagttttaaaataaaaagaggttcctggacatctttgataggtcacaacggtagcggtaagtccacaatttctaaattaattaatgggttacttttgcctgattctgctaataattctagaatcactgttttaggaatgacgttaaatcaaaagacagtctgggatgttagggaaaaagtcggtattgtatttcagaatccagataatcagtttgttggagctactgttggcgatgatgttgcttttgggcttgagaatagagctgttcctcgggagcaaatggtaaaaatagtcagaaaagttttagcagacgttggaatgctggattatatagatgcagagccagctaatctttctggtggacaaaagcaaagagtagcaattgcaggtattcttgccgtagaaccgaaaattattattttagatgaatcaacttcgatgcttgatcctaaggggagagagcaggtgctaaaaattattaagcatttaaagaaagagaagaatttgacagttatttcgattacacatgacattgatgaggctaatatggctgatgatgtgatcgtcttaaatgatggcaagattttagctcaaggaactccaactgaaatttttagtaaaactgaaatgttgcaagaaatagggctagacattccatttgtacaaaaattaataaataaattaaatgaagtgggaatttctgtacctaaaaatataaaaacgaaagatgagttgaaacaatatctatgtcaattaaatttgaaaaagtaaattatatctattctcccggaacttcaatggagaaaaaaggattagataatgtttcatttgaattaactgaaaatagttttgttgcattggtaggtcataccggtagtggtaagtcgactttgatgcagcattttaatgcattactgaagccgagttcaggaacaattgatattgctggttatcatattactgctcaaacaggaaataagaatttgaaaaagttacgcaagcgggttagtttggtttttcagtttcctgaagcacagctttttgaaaatactgtgcttgaagacattgaatttggtcctaaaaattttggagcaaccgatgatgaagctaaaagtaaagctttgaaatggttgaagcgagtaggattggatgaatcgatggcaaataagtcgccatttgagttatctggaggacaaatgcggcgtgttgcaattgctggggtaatggctgatgaaccagaaattttatgcttagatgagccagcagcggggttagatcctaagtctcgtaaggaaatgatgaaattatttgttgattatcaaaaagcaggtcatactgtaatcttggttacgcataatatggatgatgtggtcgaatatgcagatgatgttttagtgatggaacatggtaaattaattagacatgatgcgcctaaggcgatttttactaataaaaactggctagaaaagcactatttgagtgaaccaacggctagtctttttgcctcagatttgacgaactttaactttaaagataaaccgttaacactggatcagcttgttaatgaaattaagaaaaatttgcgagggtagtttatgagtaagataattgtaggacgttatattccgggagattctcttatttataaaatggatcctcggagtaaattattagttaccatattatttatattggctatctttttagctaataattcaataacttatgcgattgtgaccattttttgttttttggctgtgatcgctacaggattaaatgcaaaagtattttgggatggcgttaagcctttgattggtttaattttctttacgtcgcttttgcaattgttttttatgactggtggtcatatttattggcattggtggattttttcattatctagctacggtttgattaatgcaatctatatttttattcgttttacattaattattttaatttcaacagtaatgacagttactacaatgccacttgaaattgctgatgcgatggaatggttgcttaagccgcttaagttgtttaaagtgcctgtggataaaattgcgttagtaatttcaattgcacttcgtttcgtaccaacattatttgatgaaacattgaaaattatgaatgctcaaagatcacgtggagcagattttaatgatggtggtttgattcaaagagcaaaagcaattactccaatcttagtgccgctgtttattcattctttagaaacagcaattgatttatcaacggcaatggaatcacgcggttaccgtagtagtgaaggacgaacaagatatcgtgttttaagttggtcaaaatatgatctaattgcattaatctattttgtattgttggtcggattattattaatttttaggacacattaaagatatgacaacaagatataagatgacgatggcttatgatggccatctttttcatggctttcagcttcagccagatcagcgaacagtgcaaggaacaattgaggatgcactgaaaaaaatgactaaaggaaaacgagttattgtgcagggctcaggacgaaccgatgcaggtgtgcatgcagttgggcaagtaattcattttgattatcctgggaagacaataccagcgaatagaatgattttagcgatgaattcaatgatgccaactgatattatttttaataattgtcaaattgttaatgatgattttcatgcacgttactccattaaaggaaaatggtatcgttatcgcgttagtttagatcattttgttaatccatttaaacgtttttatacaggacattttccatatccactagatattgaaaagatgcaaattgcggcacaagatttgttgggaaaacatgactttactagttttgcggctagtggtggtcgaattgaagataaagtgcgaacaatttattatgtaaaaatcacagaggataaaaaagataatgaagtgatttttgacttcattggttcaggattcttatataatatggttcgaatcatggtagcagcgttgcttgagattgggaatgatcgtagaccagtgcatgatttgcagcgggtaatcgcggcaaaagatcgacaagaagtgagacaaacagctcatgccagcggtttatatctttatcatgttttttatgatgaagtaccacaaaaatatcgcttagatcagcatttataattgacattttgcctaaaaggacgtactctaatatagtatgtttgtccacgataggccccggaaacttattgttttcaaactgcaaataaacggaggaatttaaattgcgtactacaccattagcaaaatctagtgaaatcgaacgtaagtggtacattattgatgcaactgacgtaacccttggtcgtctttctgctgctgttgccactattttgagaggtaagaacaagcctcaatacacacctaatgttgatactggtgataacgttatcgttatcaacgcatcaaagattagattgactggtaaaaaggcttcagacaagttctactaccaccactcatcatggcgtggcggcttgaaggccgtttcatacggtgaattgcttgctaataacccagttaagatggttgaaatctcagttaagggtatgcttccaaagaacactcttggtcaccatgaattcatgaagatgcatgtttatgctggcgaagaccacaagcacgaagcacaaaagcctgaaaagttagatattaacaaattaatctaggaggttatataatggcacaacaagctgcatacacaggtactggtcgccgcaaggattcagttgcgcgtgttcgtttagtaccaggtaacggtaagatcactgttaacgataaagatgttgatcaatacattccattccctaacttggttaaggacttgaagcaaccattgacattaactgaaactgaaggtcaatacgacattcacgttaatgttaacggtggtggtttctcaggtcaagctggggctatccgtcttggtatcgctcgtgcacttcttgaagttgacccagacttccgtagtccacttaagaaggccggtttcttaacccgtgacccaagaatgaaggaaagaaagaagccaggtttgaagaaagcccgtaaagcttctcaattctcaaagcgttaatatttacgttcaaaaatgttgttatatcaacgttttggagacttcagttggtcacctatggtcacaatgctatagggattccaatagatttaaagcattcgcatcttgcgagtgctttttttctggcattaattccagatagtatttttcagtagttaagattgaatcgtgtcctaatcttctgctaacataagataaaggaatattattactgaataaaaaagaagcgtgggtatctcttaaaccatgaaatgtggttgaagggatgcctatttttttgagcaattcttttaacataccagactgtttaaagctgaaccagtcaaacaaatagccagaatctttttgagagatatccttcaatagatcgtaaatattcttaggaatagtcacactgcgtctagaatgtttagtttttaatttagtatcgtcagtagtagggctaattgatcgttttacttcaacgcaataatactgaccatcgtaatgcacatcctcaggcttaatacctaaaatttcaccacgtcttaaaccagtactaatctcaagtaataccattaagttaaattcattatctgtatgttcaagtaagtaatgttttaacttagttagatcagacattgatgaagctttattgcgtttaggtaattcttttccgtgtgctttaagtaaactagcaaaatcattgtaaatgtatcccttaacataagcatagcggagagcagttctaattttcttaagtaattcagttaccgttttcttagaatgtgttttgccatatttatctaagatactttgcatttgtacgtcatcaagcttaccaagtttagcggttggaaaaagattatcaattactttaccagctttaacataattatcaaaagttgcttttctaacgtcatgtacttttactgtttgaacgaataaataataaaagtccttgaataaagtgttttgctgggctattgcttgacctttagccttttgtagttcaagagtagtactccaaactttagcttctttttcagttttaaaactcttagttaagtaatcacgttttccgagactgtaaaatagtttgtgtaaggatgaatgattccttaaatttatttctttaaacattagaaaaaggagttcctttctcgtatgattggtttgaacaaaaaaacacatacagaaagaagaactccttcatgaatgattttaccaaagattttgctcaagctctattcaatccagacaaaataaatgatttattgcgcaaagagctacaacaggctgttaataacttgttagaagctgaattgaccgcctttctgggctatgatccctatgccagaaatggctggaatactggcaactctagaaatggtgcttatttccgcaaagttgatacgcaatttggcccaattgaagtgcaagtgcctcgggatcgcaacggtcaatttcatcagcacacgctgcctgactacaagcagcactcggatatcttggaaagcatgattatcaagctttactccaagggcgtgaccaccagggaaatagccgatctaattgaaaagatgtatggcagccattacagtccagctcaggtatcaaatatttccaagcagatgattccaaaggttgaggcttaccacaaacgcaagctaagcgacaagtttttctgcgtctatttggatgcgacataccttcctttgcgccgagaaacatttgagcgtgaagcagtctatattgccattggcatcaagcctaatgggcacaaggaggtcattgactactgcattgcacctagcgagaacattgaagtctggacagatatgcttcaaaacatgaaatcccgaggcttaaagcaagttgagctttttctttctgatggtgttgttggcatgaaaacagccttggccaggacttatcctaaagctcattttcaacgctgtttggttcatgtcatgcgcaatatctgcgctaaagtacgcgtcgacgatcgtgaaaagatcatgaacgaattcaaacaggtgcatcaacagacaaacaaagaagaagccacagctgtcctgcatgacttctataccaaatggggcaaggtttacagccatgttatcagaagcttgaaagacatagaaccagatctgctggtcttttataactatcccaagcagatcagagcttcaatttattcgactaacatgattgaatcatttaacaatgtgatcaagcgcaaagctaagcctaaggcagagtttccaactgaacagtcgcttgatgcttttattggcattcaggcaatgagctacaatgaccgttatttcaatcgaattcataaaggctttggtcaggttcaggacaccttagaatcctactttgattaaataaataattaaaaaatcaatttacgagaaagatctatttacacaaaagatttgacagtttccgttttccatgttgatagattgttactctggctctatatgatgagccacgtttttcaatacttgccataaatttaatcgtcctttcaaaagaaaagccgattatcttaccagcaataaagttagcagataaccgactatttctcaaatctttttcaattttgtttctttaagatcgatgaaagcttcgatacttttaatggtaaagcgttctgtgtgttctcctagtttaaatcttttaaagtcaggatcagagcgaaatactttatcaaaagttttgggatcaataccaatatattttgaagcttcttcgcgagttaataatttagccactattattctcctgagattgtttagttaccaatattgagataaaatctaggtagtaggtaatctagtcattgcttttgtctctattagcatgactagtatttttttgcgattttatcttccaaattgcttcggataatttatcatcagtgattagatcatttttaactttattagtattgcttttagtaagttgcaacgggataattcgtcttttcaactgttcaaaagaatcaatgacttgattagcaatattacattcaagataaaaactaagtggatcataaggggtagtgatgtaaatggcacgcgcatttagataacgatcgtgataccttgcgggagccattttgtctatttcccaaggatccaaaagggtaagtagttgaccatagtcatagtcatttggtcgcaagtcattaattactatgaatttttgccctttgtattcttgaaagtgatcccgttgactacctgaaatacagaaatcttcaggatgttgtttttctaaaatttcccgtactaacttagtcttaccaattccggaaacaccatatatccagtagaccttacaactctgacctttgaagtcctttaaaaaccgttgatgctttttgtaagctaggatgtcttcaatatgatctaacagtgttttatgttttgccatctcaagaacaccgatttcttcttgaagttcttctttagtgattttttcatttgaataatcatcaataaagttttcaattgcttgtcgtgatggctttttgactttttgtctaatctcattgattctatctttaaaatcaaatgaagctactacttcttttggatcataatgatgtttactcttagcattagtagtttcatggatcagatagctatagccattgttaataatactgtgccatgcttcaatatattgttcatgatcattgaaaatcttagatactcttgaaatggttttagcatctttgaaatgaagcattacatgatagtgaggtcgaatcttttaacttatctttactaaatggtaaatgatctaaatcttgggtatacataaagttgtgagaacgtattatttttttcacaattaaagatttcctttctattcaacacgaactacatattaactttggggctagataacaagttcattattactttatttttgtttatcagatggaaagcaattgcaagaagcagcagatatattagccaaggctaaggtgcatctatctatggtgatattttcaccttaaatcaaactgcagcagctatggttaaagttgctcaaggaggtaataagggtaaagtattactgcaaatgaatgaagcttaagttaacatgaaataataaatacatttagataaagaaagaccctcaaagattctaaatttgaatttttgagcgtctttttagattgctaatcattttaaaggtacttgtattacatttactcctgctttaataaattcattaattacactgttttctacaaaagtatcagttattaataaatcaatatcttttattgttccaatagtaaaattagagaatttattgaacttgctatagtcggcaacaacaataaccttttgtgattgctgaataatagttttattaacttctgcttcttccataactggtgttgaaataccttggttaatgctaattcctgcgcaaccaataattgcatagttggcacgtaaagatagaaatgctttagttgccaaatcaccgctcatgattaatttatgatgtatttccccacctgttaagatcactttgcttttagtattttcaaaatttccagcataaccattgttagtaacaattattatatcctttgttaataaatgtggaattgcatcaaaggctgtactactagagttaataaatactatatctccatcgtgaatatatctggctgcctcttttcctaagctttgcttaatgtaactaacgggctgagataatgggatttcttctggtgcaacaagggatatgacaccacgcttttttgaaatcttacccatttttgacaaataatcacagtctcgtcgaatagtcatttcagaaaccttcatctttttgcttaattcagaaatagaaatttcccttgtgtgatttagtaaatcaatgatttgcttgcgacgttttttaattacttgaattgaatttttcatttttaatgatctctttcacttcaataaatacttactaatacttcaccagaaaagcattaacttttgaatttaaataaaaaacgccccgaactggttactattttaccattcaaaataataattcacatattttatgttataaatgacttgaattttacaaaaattaacataaaatatgctaaattaacatatataatggttgaaagcactcacatctaagcgcataataacattgaagacgaggataagaaaattaaggaggatttattcatgtcagcaccaaaaaaaatagaagatgttaatttcaaaacttttgcagaaaacaatttcccagaatggggtacgttcttgaatgaacaaattgctgataagcaagtaccagaaaaaagtattgcaatgtggtggttaggctgtatgggggtttggattaagactcatgaaggcaccaacgttgctattgatatgtggaacggtactggtaaacatactcacggtgacggtaagatgcgtaaaggtcaccaaatgatgcgtatgaccggtggtgaagctttacaaccaaaccttagaaacaagccatatgtaattgatccatttgcacttcgtgatcttgatgctttatgtgtaactcacactcaccatgatcacttggatatttacactgcagcatgtgtaaacaagtattgcccagacgctaaatttattggacctcaaggcgttgtcgatgaatggatcgaatggggtgttccaaaggaaaagaccattgttgtaaagcctggcgatgaagtcaaggttggggccgtaactattaaggcaatggaagcctttgatagaactgaatttgttaccgaagatgatccaaacaagaagttagcaggtactatgccaattgaaatggctaaagttgctgttaactacttagttaagacttcaggtggtaacgtatatcactcaggtgactctcactattcaaacacttacgtaaagcacggtaacgaaaacgaaattgacgtaactctatgtgcatacggtgaaaacccacgtggtatcactgataagcttgacgactcacaagttttgagaatgggtgaagctttaaagacaaaagttattattccaatgcactatgacatttggactaacttctacagtgatcctaaggatattttagctctttgggaccgtaaaaagtaccgtttgcaatataaatttaagccatatatttggcaagttggtggtgaatttgattatccacaagacaaagataatttcgaatacatgtatgatcgtggattccatgatgcatttaagaatgatccagacttaccattcccagaaatgctatagtcccgtttttgttgattaactagctcaacgtctttaaccaaagctgttgagctgagggaggagacgctgatgttacgttactttttagaaaataatttattaaacattactgatgaacatcctgagacttgggaagaagcaattagagttgctggtaaggtaatgaagcaagacaagttagttactgatgattatattgattcagttattgctgatgttaagaaatatggtccatacattgttattgttcctggtgtggcaatgccacactcaaaggctgatagcgaaggagttttaggtactggtataggtcttacaattttgccagaaccagtttcattcgatgaatcagacccagataaaagtgcaaaattattctttatgctagcagctaaagataataatacacatgtcaaaaatattgcccatttatctgacatgttaatggaagataacatgattgatgatctttctaaggttaagaatttagacgattataaggcagtaatgaagaaacataatatgtgatatcggaagcggggagtataaatggctatattaaatattctatctaagatatgggattattttgctaccaatattttgcaacaaccagctttcatgattggttttattgtcttacttggttatatcttagagaaaaagaaatggtatgaggtcctttcaggcttcttgaaagcaacagttggatactttattttatcggctggttctgttggactgatcaatacttttagaccaattttagtcggattaaaagatcgttttcatttgaatgcgatggtaactgatccatattttggacagaatgcagttactgccggaattatgaaagagtttggtagatcttttgccgatactatgcttttgttgttatttgcatacattatcaatatcgtgttagtaagattttcaaaatatactaaattacgtgctgtttttacaactggtaacgtgcaagtacaacaagcggctaccgctttctggttgatcttgttctgttttccaaaattaggtcatttacctattttaatcgttatgagtattatcttaggtttatattgggccgttggttcaaacttaactatagatattactcaagagttaactgatggtgctggctttgctatcgctcaccaacaaatgtttggtatctttattttcgctaaattatcagaatttttggaaaatagagccaaaaagaaaggcctgaattgtcaaattaagtgcaacagttaggttatgaagagatatattgcttgaagagttcctctgctgtgtgatattggaggattcggcgatatttgtggttaatggcatcagttgcctgttgaacataagcttttgacttgtctttcatgctcttgcccttagggaagaattgacgcaaaagaccattgcagttctcattggtgcccctttcccatggagaatatgggtgagcaaagtaaatctggcagcccttgatcttggtcatatccgcaaactcagagccattgtcaaacgtgattgatttaaaccaggcaggatgtctgtcaatctccttttgaagcagcctttggcatgtgcttgcccgatagtcaggaatcttgataactacttcaaagcgtgtggttctttcagtcaaagtcattaaagcaggctgattcttgcgtctgacgcctttaaccagatctccttcccagtgcagcggagcttttctgtcttcaacctccttaggacgctgttcaatggaattgccaagatgcttcttgtgcaaagcgtgaccgccatggctgtgatgacgcttgttcctgcgtcttttgagcttcataggcagatcaatattgcttatgtccagcaagccctgatcaatatagcgatagacggttggtgtgctgggacaagggtagcctggcatagtccttttgaattcaccaacgaactcatcgatgctggtggcatcaaatttagctttaaagcgtctggagagcattctcaaaaagacagcataatgcttcaatggattgcgctgatagcagtttttgcgacgcttctcataataaatctgtgcagtatcagcgtaatagtgctcatacaataaatagctgctgtctctttgcaggacgcttccgcgtttgatttcgcgactgattgtcgacttatggcagccaacttcttgagcgataacagtacgggaagttatgccggaatccagcattgcttgaatttgtccacgttgtacgctggttaattgatgatagtgcttagaaatgctagaatttgaattggtcatgaagatcttcctttcttgatttttcgtcacttcaagtttaggtcttcatggcctttttgtttaacacttagtgttgcacttcaattttaaatccgggccaaaaagaaaggtaagaaagaagccagacgattagaagatgtaaagttaccaggtttcatgtcaattttcaacgacaatatggtatctacatcaattttgatgttaatttttatcggtgcaattttagtagtattaggtccagattacttagttaaagctaaatttatgcaacctggccaaagttttattttctacatcttacaaacttcattacaatttgcagttttcttagcaatcttacaattaggtgttcgtacattcgttaatgaattgactgaatctttcactggtatttcagacaaatggttacctggctcagttcctggtatcgatgtcgcagctaccttaggttttggttcacctaacgcaggtacaattggtttcttgtttggtgcattaggacaattcacaatgatcattttattgttgattttccactcaccaacaattgttatcgccggatttatcccgttattctttgataacgctgctatcggtttgtattcaaataaccgtggtggtttcaaatatgcaatgatcatgccttttatttctggattgatccaaataggcgggtctgccttaattgctacctgggtaggtatggcgaaatacggtggttacatcggaatgttcgattgggctacagtttggccattcttcacagtattgatgaaattcttaggctttgttggtattgctcttgtaataatcattttggtaatgattcctcaattgcaatatcgtgccgataagaaaggttacttcatgattactgaagattatgaaggttggaagaagttacatggtaaagaatagaggttaattaaaatgaaaataatgtcagcttgtgctaatggttcgggaactagtttaatgctttctagaaccgcaagaaaagcaatggaacaattaggttatgaaattacagtttcagatcatacttctgtttcagaagctagaggaactgctagaaactatgatgtggtatttacatcattaccttttgtgaacatgtttgatgaagtaaagcaaaagggtggcgaagtaattggcgttaagaatgtaatgtcagttcctgaagtaaaagaaaagatcgaagcttcagatattccaaataagtttaagaaataatcttaggagaattaatttatggctttaccaatgttacaagttgctttggattgcgagagtactgctgaagctttaaatgtcgcaagacaagtaatggatcaagttgatgttttggagacaggaaccattctttgttatcaagatggtgtaaaggccgtatctgctttaagagcagtgggaccagataaaatagttttagcagatgttaaatgtgctgatgccgggactaagttcggtaaggcaagcaaagatgcaggtgctgattggatgacttgtattaacgctgctactgttcctaccatggttaatgctagaaaagaaattgaagttcaagttgaattatatgaaggctgggacaataaagaacgtatgcaagaatggcttaacaatggtattgatcaagttgtttaccaccaaagtagggatgcaaaatttgcaggccaaaaatggggcgaaaaagatgttgcaaacgttaaggccttgattgacatgggctttaaggtttcagtaaccggcggagttcatccggaagttttgaaattatttaaagacttaccagtgtattgttttattgccggccgtgatatcagaaatgcggaagatccacatgcgcgtgctaagcagtataaagatgaaattaagcgcatttggggttaatcattaattttactcatattaaaaaattccttaattagttttagaaagggcaatgcacgtaaaaacgtttattatgcattgctctttttgtattaaaaggcaggtataggttatgactgtaaactcattaggtatttacgaaaaagcattaccacaagatttatcttggaaagaaaaatttaatttagttaaaaaattaggcttcaattttttagaattttctgtagatgaaagtgatgcacgcttagcacgtttggattggaccaaggaacaaagaaaagaatttagagatttaatgtgggacactgacattcgaattaataatttgatgttatctggccacagaagatttcctcttggatctaaagatccagaaaccagaaagaaatctcttgaaatgtgccaaaaggcagtagatctctgtgtagatttaggaattcataatattcaaatggcaggctatgatgtttattatgaagaaaagagtgagaactctagagaattatacgttgaaaacttagctaaatgtgttcatatggctgcaaagaaaaacattatgctttcgattgaaacaatggatgatccatttattactaacattgcagatattaaacaatataaaaagcaagttagaagcccatggcttcaagcctatccggatttgggtaacctctctgcttggccacaaaatgatcctgctaaggatttagagaatggaattggtaatattgttgccatccacttaaaagatactctggcagtaacagatggttttgagggtaagtttagagatgttccatttggtgaaggctgcgttgattttgaaggactacttcgtgaattagtaagactagactataacggaagttttacgattgaaatgtggccaggtgataacggtgatgatgatcctgttgctgaagttaaagaggccaaagctttctttgacaagatctttaaaaaagttggaattgaacaagaacctgtagattagaaagtggaaaataaaatgttagaagatttgaaaaaagaagtctatgaagccaatatgcaattacctaagttaaatttagttacttttacttggggaaatgtttcagggattgatcgtgaaaaaggtctgttcgtcattaagccatcaggtgttccatatgaagaattaactcctgaggatatggtagttgttaacctaaaaggtgaagtggttgaaggtactagaaatccatcttcagatactcctacacatacctatctatataatcattttcaaaagattggtggtatcgttcatacacactcaccttgggctgtttcatttgctgcagctaagatggatattccagctttgaacaccacacatgcagatactttctatactgatgtgccagcagctgatgcattaactaaagaacaaattgaggaagattacgaaggtaatactggtgtcactattgtcaaaacctttaaagagcgtggtctcgattatgaagcaacaccaggtgctttagtttcacaacatggcccatttacttggggtgaaacaccagctaaggctgtttataatgctaaagtcttagaagttgtggcggaagaagactatcatactttgcaattaacacgtgctaattgccatttaccacaatacctacttgataaacactattatcgtaagcatggtaaaaatgcttactatggtcaaaataatgctcattcaaaagatcatgcaaagcgtgcctaaaactaaggggtaaaaaatgcttgaaaattatttttttgattttgataaaactctggctagttcaggtaaggcgtcattgattgcgacaaagcaggcatttaagttaaataatttagatgagccagatgatgatcaaattttagattttatgggtattcctgctgatgtttcattccctaaaatggctaatagagaattgtcagaaagtgatgcgaaaaaattagttgatacctaccgtaatatttatggaaagtatgaaaaagaaaatacacatttatatcctggaatgcgagatgtactagaggatttacagcaaaaaggtaaaaatttatttgttgtatccagtaaaagtcatgatattttaaagagaaatttagataatttgaaaattactcaatattttaaagactttgtgggatgcgatgaggttcagcattataagccagccccagatggtattttgatacttttagacagatacaatttgaataataaacaaagtgtaatggtaggggatgctcgttatgatttgcaaatgggcaaatcagcgtctgttaaaacttgtggagcagcttgggatgcttttagtgtggatagcttaaagaatgaacatcctgattatttgctatttcatgtggcagaattaaaaaatattgaatagagttcatatattttaaaattggatggtatcaattttgaaagtagttgaactctttagcaaaaatgatattattaacttgtaagggaaaacggttgcataacgatggtctataggaggacatcatggctgtagattacgattcaaaagaatatttaaagagcgtcgatgcttattggcgtgcagcaaattacttatcagttggtcaacttttcttaatgaaggccccacttcttaaaacacctttagttgctgaagatgttaagccaaagccaattggtcactggggaactattgctccgcaaaactttatttatgctcacttaaacagagtgttaaagaagtatgatctggatatgttctatattgaaggttcaggtcatggtggtcaagtaatggtttctaactcatatctggatggttcatacactgaacgctatccagagatcacccaagatgaaaagggtatggctaaattgtttaagcgcttcagtttcccaggtggtgtggcatcacatgctgctcctgaaactcctggatcaattcatgaaggtggggaattaggttactcactttcacacggtactggtgctatcttagataatcctgacgtcattgctgctgttgaaattggtgatggtgaatcagaaactggtccacttgcagctagttggtttagtaacaagtttattaatccaattaaagatggtgcggtattaccaattttgcaaatcaatgggtttaagatttctaatccaactattgtttctcgtatgagtgacaaagaattaactgaatacttccgcggcatgggctgggatcctcattttgtttcagtctttaaaggcggtcgttttgacggtgaaaaggatccaatgcaggttcacgaagaaatggctaagactatggatgaagtcattgaagaaattaaggctattcaaaagcatgcccgtgaaaacaatgacgctactttgccacattggccaatgattatctttcaatgccctaagggctggactggtccaaagaaggatttggatggcaacccaattgaaaactcattccgggctcaccaaattccaattccagttgcacaagatgatatggaacataaggaaatgcttgaaaaatggcttaagagctacaagccagaagaattattcaatgaagatggttcacctaagaagatcgttactgaaaatacggctaagggtgaccacagaatggccatgaatccagttactaatggtggtaagaaccctaagcgtttgaacttgccagattaccgcaagtacgcattgaagtttaagccaggtcaaatggaagcacaagatatggttgaatgggctaaataccttagcgaagttgctgatcttaacccagacacattccgtggctttggtccggatgaatctaagtcaaaccgtttgtttgcacttcttgatgatcaaaagcgtcaatgggaaccagaaattcatgaacctaatgatgaaaacctagctccaagtggtcgtgtaattgattcacaattgtcagaacaccaagatgaaggattccttgatgactggccgtcatggcttcttcgctacttacgaagcctttggccgtgtagttgattcaatgcttacccaacacatgaagtggttaagaaaagctaaggaacaatactggcgtcatgactatccatcacttaactttgtcgcaacctcaactgtcttccaacaagaccacaatggttacactcaccaagacccaggcatcttgactcacttatatgaaaagaatcgtccagaccttgttcatgagtacttgccatcagacactaatacgcttttggcagttggcgacaaggctttgaaagacagagaatgcatcaatgttttggtaacttctaagcagcctcgtccacaatggttctcaattgaagaagctactaaattagctgataaaggattgagttacattgactgggcttcaactgatcaaggctataagccagatattgtatttgcttcaactgaaactgaaccaactttggaaagtttagctgcaattgatatcttgcacaagcgtttcccagaccttaagattcgttacataaatgtagtagatgtgatgaaattaatgagtcctaaggataataagaatgctatctctgataaagagtttgatcgcttattcccaagtgacattccagtaatctttgcatggcatggatacaagactatgatggaatcaatctggtttgcaagaaaccatcataatatacatattcactgttacgaagaaaatggtgatattactaccccatttgacatgcgtgtcctgaaccaccttgatcgtttcgacttggctaaggatgctgttgaaagtattccatcattggcaggtaagaatccagacttcatcaatgaaatggatgacttgcttgctaaacaccaccaatacattcgtgataatggtaaagacattcctgaagtcactgagtggaagtggacaggtcttaagtaaaaaataaagtgtctgggaaaaaactaactcttagaccataataataggacgatcaaaattcttaagtgagttttaatcgtccttttttcttttaaaattaaataaaaacggtcttttggtcattttctgttccaatatttgcttatattcatcatcatgaaggctattccaacatcggtttcaactttctttttgcctcttagatgtgtttgccttcttcgctttgaagaacttcttttgctttttcttttaaatactgccagttagggttatagcgtacttgacgctggcgaccgctagctgtcttagctaattgttccagttctgacgtaagcttcaactgcctggcccttcagcttatcatgatacttttcgacagccttgcgccaaacaaaagtgtagcggttagcatcagcttcaattttagtgccatcaataaaaacagccccctcgttgatcagccaacagattggtaaagtagataaagctcttcttaaccagttcattggcatgactgctgtgtggtatactggtcgacctgttttagcagggtgtaaagcagaatagcttctggaatcgaatccacaatccagctgatagcattagccaagtgattgctgggaatggtaaaatccaaattgagtgttaaagctgtttgacctgtgatatgatttttgtacatattagtttccacctttttgttttaatgaaataagaggccacaaatgatcacattttttatggagaaatttaaaatgttaaattttagatcatatgaagacgcagatttcgaaaaattatgcaacatccacgatcaagcgcgaaagcaagaattaaaatttgccaatcttgaagctgcatttattccattcaaaatagcatcaaagaaagagcaattatttgaagactatcaagtttacgttgcaacaaaagaaaataaagttgttggttttgtcggatttaacgaagaagagcttggctggctctatgttgatcctaaagttcaaggacaaggtattggtagtaaactgattgattttacgcttgaaaattcgaccaggccattttatttagaagtgcttgagggcaatcctgcacaaaagctttatctcaaaaaaggtttcataacaattaaacatgaaagtggcaagatgccaggtaatgaatcatttagtgttgaagttgacctaatggaatataaataaaacatcccaatcaggtgtgttttttgttagacttataaaaaatgaagctagtcaataaagtattgtcttgtcattagaaagtactacatatgaagtatatttcatgaagtccgcttcatattttagggatgatgattatcaataataaaattaaggaataccgcaaaaaacatcaacttacacaacgcgagttagctgaaaaagttggtgttacagaacggacaataatttcattagaaaagggtcggtacaaaccatcgattgttttagcttataaattagtacaattttttgagacagatattgaaactttattttgcttaaatgagtatgtgaagaatgagcaagccaaaggaaggaatgcttacaattctttttgcgattctatcagtcatacagctcttagaattaatttatgatgttgcaaatagaaaaagcgtcaattatattcaagatgttatttggttaatattgggcatctgtttgacagtcggttatttctatagtactaaatatatcggtatagccaagattgaagaagatgatgaacgcgataaatttattcaaactaaaactaataatcaagcattcaatattttacagtgggtcctttttgttttaggtgcagtaacgataataattgatgttaatctcggccaaatgggattagattctcgtgcaatggttattatagttgtaggcgttgtattaatctttttatgggcattttcttggattttgcaattaatcttaatgataattaattatttttgcaattgagactacaaaaaataaagcgactggattagctctggtcgcttatttaaattttagtatggcatttctttaaaaaattagaatatcgatctttttcaccgtttaccttccaatattaaccattcaccgaaatttttaaatttaaaatattttttcgtctatactgataagcaagaaaggagaaaaagggatgaaggtaaaatttaacattgataatcaattagcgggagaaagtgctgaattttggttaaaaaagatgactaataaattcagtcaattgggtaaagaattaagtggtgaacaagacacgatttggtgcagttatgatgatgaaattattcctgtgaagtttgaaaatatttatttaattcaagtcgaacaagagcaaactttaatttatgacaaaacacagagttacaggtataaagggcaattatatcaggttaaaaatattttgccacataattttttaatagcgtcaagaagtgcaattattaattatcaaaaaattgatcatttggaagttatggatggtggcaatattgatgtcattatgaagaaccaaatgcgggtacaaatttctagaagaaaaattaaagacttgaaagagaggttagggttatgaaaagaatggaatctttcttggtaagtggaataagtggcatgggaattggattaacttggtattcaatagtaactttatttcaaacgggaacgaattggaaaaatgctcaaattccgtttacaagtttgctcttttatttgattgtctcttttgtgatgggagcatttttcaatttgacaggattgatttttgaacaaacgcaatggtcactacgaaaacaaattattgtaaacttttttgttagctatgttgccttttttgcttttgaattagtgattaatgatttggctttatcggttcatttcttcttagtaattactggagtatttgtcttgatgtacttgctcgcttatggtttgtactttttacaattattgcgagatgttaaacaaatcaatcaaaaattgaaagaaaagtaaataatcaaaaacgatcaagcctaaaaatcttgatcgttttttcgttggttagataaaaattataaactgtcttgaatattatcagctaagtagtcataaagcataccatgctttaattgcttagtatcaactcccaaagcttcagcaattgcataggcaaaggcccaagcggtagcaggaccacggcttgttaaaattttatgctctttatcagtaacggtgattttctctgaaaaatgagcacttggggcatcttttaagcattcttcttcaatgcctggataacaagtgaagtccgcatctgccaaaacaccatagcgagcaagagcacgtggagcagcacacattgcggcatcccacttgccagcttcatgacgcttaatcatcagatcacgtaatttttcattatcgcgtaagttagcagaaccagtcatgcctcctggaaaagcaaccaaatcataatctaataaactgtcatctacaactttgtcacaagtgatttcaatatgatggtcaccatctacttttttacttattaaacctaccatatcgcattcaacgttaagtctacgcaatacgtcaacaacgcttaaaccttcgacttcttcgcaaccgtctgcaaatactacagcaacttttgtcataaaatcatcctttctataactattttaattatctacttacattagatctaagtaaaatgaaagatctgctaatttgcttaaatgaagagtaggatgaggtgaaattggtatcttgtcttttttaggtgccagccataatgattttagattggcattttctgcaccttgaatttcttcatccagattagttccaattactaaaactgtgtctggatcaatatctggattgtctttcagaatcttaaagaaaatatttttgcttggcagcttgtccgtaaaatcatcggcgaaataagcattgtcaaatgaagaaagcaattctgtaggtgcaaggcgcggttcgatttgagtgcgcttttctttagcaagcaaaatcaaatgcagcttgccactgacttcatcaataaagtcgatggcgcccttgactaacctggtttgatccttcattgcatcatcaaaaacagttcgcgttttagaaagatcttcttttaaaaatgtagataaagctaaatcgatttgatcatcgctagataaatttttaaattctttttctaagctagtgtagcgtagtcgctcagctggtccccagtctaacccataatgttttaaagtttgccgcagcgcagttttttctgctaatttttcatttaataaactgccttctggaatgaaaattaaggtttcaaatgtagtcatgaataaacttcctttgtgttagttcctattagaattataatgaactagacaattttaggaaaggaattaaaaaatgacaatctggaccgtaattttcttattattaggtggcgttgcaggtggcttattatcgtcagtggcctcaatggcatcacttgcatcatacccagttttgctagcagtaggaattccaccagtatttgctaatgtaactaatgatgcggcgctaatttggactagcatcggttcaactgtatcttctactaaggagttaaaaggacattggaagcaagttttgttctataccatttttacagttgtgggatcaattttgggttgtattttgcttctatcttttcctccaaagatttttgaaaaagcagtaccattctttattgctttctcaggattgatgattattgtttctggtaaacaccatagtttaaatactaagacacagcctacttggcttaaaataatttattttctcgcacttttagtcatggggatgtatacaggttactttggtgcagcgagactgtaaaatagtttgtgtaaggatgaatgattccttaaatttatttctttaaacattagaaaaaggagttcctttctcgtatgattggtttgaacaaaaaaacacatacagaaagaagaactccttcatgaatgattttaccaaagattttgctcaagctctattcaatccagacaaaataaatgatttattgcgcaaagagctacaacaggctgttaataacttgctagaagctgagttgactgcctttctaggctatgatccctatgccagaaatggctggaatactggcaattctagaaatggtgcttatttccgcaaggttgatacccagtttggaccaattgaagtgcaagtgcctcgagaccgcaacggtcagtttcatcagcacacgctgcctgactacaagcagcactctgatgttttggaaagcacgattatcaagctatactccaaaggcgtaactaccagagaaatcgctgacttgattgagaaaatgtatggcagtcattatagtccagctcaagtatcaaatatttccaagcagatgctccccaagattgaggcttatcacaagcgcaagctaagcgacaagtttttctgtgtctatttggatgcgacataccttcctttgcgccgagaaacgtttgagcgtgaagcagtctatattgccattggcattaaacctaatggacataaggaagtcattgactactgcattgctcctagtgagaacattgaagtttggacagagatgcttcaaaacatgaagtccagaggcttgaagcaagttgagctttttctttctgatggtgttgttggcatgaaaacagccttggccaggacttatcctaaagctcattttcaacgctgcctggttcatgtcatgcgcaatatctgcgctaaagtacgcgtcgacgatcgtgaaaagatcatgaacgaattcaagcagatacatcaacagacaagcaaaaaagaagctgcagctgtcttgcacaaattctatgccaaatggaataaagcttatagccatgtcatcaaaggtttgaaggaaattgagcccgatctgctagtcttctacaattatcccaaacaaatcagagcttcaatttattcaaccaatatgattgaatcctttaacaacgtcatcaagcgtaaagctaagcctaaggcagaatttccaactgaacagtcgcttgatgcatttattggcatccaggcaatgagctacaatgaccgttatttcaatcgaattcataaaggctttggtcaggttcaggacaccttagaatcctactttgattaaataaataattaaaaaatcaatttacgagaaagatctatttacacaaaagatttgacagtttcggtgcagctggtggagtcatcgtactagtacttttaacttacattaccaatgataaatttattgttattaacgctatcaaaaatgtgatttgtggttttgctaatttagtagccttgattatatttatgtttacctctcatatttattggcttcaggcaattcctttggcaatcgggatgttcattggtggctatattgggccagctattttaagacgagtaccggaaaagccagttcgaattttcattgcaagcttggccttcattcaagccggttacttcttttatacggcatatctgcaataagtttggtacaatattaagcaatgaaaagggggctaaggttgatggcaacagaagtttatttggtacgtcatggtgaaacaatgtttaaccaattggacaaagttcagggttggtgcgattctcctctaaccgtgaaggggattaacgatctaaagagaaccgctaaggccttgagtcaagttcactttgataacatgtattcatcggatttgaagagagcaattgataccgttcacttgatgaaggatgctaatgtggtctcggatattggtaaaattaaaaagctgcctgaatttcgtgaggtcttctttggaacttttgaaggcgatgatattaaccagacttgggaacaagtagcactagccgcaggaattgaccatgaagatgatgtaactaagatcatcaatcaggtaggcttgcgcaaatttcgtgcagcaacaaaaaaggctgatccgcgtcatttagcggaaaatcaggatgagttagatgagcggatggtacgggcaattgacgttttgcgcgatttaactaaagatgaacaaagagttttgttagttagccatggtgactttattaaaactttgtccataaaatattggaataagagtaatggcaaaaacgatattgtttttccaaataatgggagcgttactcgtggaattttgcacgatgacggttcatttgaaattgttgattataatgtagatgctgaagagctataaaagtcctactgccgaagtagggccttttttggtacactgataacgaaaggaaaatattttatgaataaagatcatacaactaagcgttatgtcttcgtaactctactgaatgttgttattactattgctgaatttataggtggtattttttcaggttcattagcactgctttcagatgcatttcataatctgagtgatgttggtgcaattattttatcttttgtggcgcacctgattagtcgcaaaagtcgtaatcagtttaagacctttggttatgaaagagctgaaactttagccgcttttactaatggcgttatcttgatcgtgatcagtgtggttttgtttgttgaagcaattcaacgtttctggaagccggaacatattcacggtggcattatgctgattgtctcgattattgggctggctgccaatattatttcaatgctagcaatgcatagcgattccaaggctaatttgaatgtacggtcaacttttattcatatgttaagtgatgccttgtccagtgtagcggttgtaattggtgcgatcttcatttacttctggaatgtaacttggcttgacccagttttgactattttagtttcaatctttgttttgcatgaagcttatgaaaatacaatgaaagcagccaatgttttgatggaatctaatcctgatatcgacttgaatgaagtgaacaagattgttttatcgttccccatagttcaaaatatccatcatgtccatgtttggcgctacagcgatgactttattatgatggacgcgcatattaatgtagccccaggattaagagccgatgaattagagcagctataccaagatattggacaggagttacaaaaagagttaggtattaatcatattaccttacaagcagagtgcgagcgtggcagaaaagacaagatgatcgttccaggccacggtattaacgaagattaggtgaaagaatgtttaatgttaatatttttacagcgattattgtattgattatgggtatttatgacatgtcctatgcttttaataggcgtaagcaacctaccaataaaggcggcattagagcctttatggctttaggaattatcttcacgatcgcaggaattgttatgatcgttagagtattaatgaagtaaggaatcttagaatggctaaattagtattagttcgacatggcgaaagtgtggcaaatgctgccaatgtttatactggctggaacgatgttccgttgactaaaaaaggtgaagaacaagcagaaaaagctggtgaattgattaaaaccatttcggattttgctcccacccacattcatacttcagtcttatcccgtgcaattgtgacagcaaatatagtagccgatgtctgcaatttattatggctaccgatgactaagacctggcggctgaatgaacgccactacggtgctttaaggggccttaataaggacatttcacgtaaagtatttggtgtggaacaagttctattgtggcgacgtagttttgattcagttccacctaagcaggggtcgccaatgattgatcgccgttataagcattttgatcagcatttgatgccacgggcagaaagtttacatcaaactcagaaaagactcatgccatattattatgatcatatcgcatctcgattgatgaatggtgaagaccaactgatcgtagcccacggttcaagtttgcgtgctttgataaaaaagctagagcagattaatgatcatgacatcgtaaaactggaagttcctaatgcggaaccgattgtttatactatggatgagcacttaaagattattaacaaacaaattttacgtaaataatgttaaaaatgcaccttagtgcatttttttaatgctctaaatgaggttttacacatatctatggtaaaatctattatgatttctagtatatttagtttggagtattaggcatgcgtaaattatttttattacgaggtgcacctggctccggtaaatcttcttttattgctcgccatcacttaaatccttatgcgatcagtcgtgatcaaattaggctactattggcggatttgacagtttactatcaagaggatgcggatgttttacaccaagtcattccgcggcacgtaactgtgcgtactgagcaaatggtggatcaccttgtagaacacaagatggaatatggcgaaactgttattgtggatgggacgcatatcgttccaagtgcgattgaacattttaagccttgggtagacaagtatcactatgaatgctttgtagtagatctgatggaacatactaccttagagagtttgcttaagcgtaatcagactagaatgcattacgattgggttaagcctgaagtggttaagcaaatgtatcgttcttatgaagcacatccagaagtaccatactgggcacataaagttgtgccaaatcagatggatcatgcgttgtcacagcgtgagacaaatttagatcgttatgctcatgtgattgcggttcctgacatggtagatgaagaagattttccacatgtgcatatctcgaacttttatttttcatttaatgacaagtttacagaaaagtatggaacttatcgaaatgtagtttcaattgctaaaactgaagatgaagcagttaagcagttcaagttgccatattttgtctttaagtttcatcacaagcactttttgatttcagcttatccaattcgaaatgagatgttggatccgatcagaaaggttaagggagtttggacatattcaactggtttgtataatgtagcggattttgtgaaagaatttccggaaaataaaaagcaacatgtgcatcagttcaacttaagtaagttagatccaacccgcttattacatatttggtaaaaataaaaaaggacttattcacaatcttagtggataagttctttttatctgtttaattcatttaatatttaaaagctaaagcacccattggatcccatggcaataattgaattgggttatctttgccttcatcgtaagccttcttaagatcttctggtaagaatttcttgttaataactgcttggtaaacaaatgaatcaaaccaagaatcactcattacgaagtaacccttaaagccaggtttttcaccccatgagttttcgatcttccatttagttggcttaccatcaacgatatcaacaccggtaatcaccatggcatggtccatcatgctttcaccagaatcaagcatgtcggctttagacatagtgaagtcagcatcaaataattgatcacggcggtaaaggttagtatcaagaagtccagcacggcgttcagaatccttaactacgtttgaaccgaaccaaacaacttcgccactcttcaattgtttaatgattaagtccttcatttcatcaactttaaggtttaagtggcgaacttggcgaccgccttcaacgttacctaagtattcaactgagaataccttgtggaaaggtttgtcgttagttggagcattgatagttgagatatggtttgctaaatccatgccaacgtacttgtcaaagaattcctttggggtaatgtccctgtcaatatggtaattcttgtcatcatcgcggtattcaaagttgaacttctttggtggaatacccaatgaagtagccaaaatacggaagacatcgtttagcatttcttccttgcgagcttgtacttcatcttctgacttgccatcttgaactaatttacgtaactcaagaccatctttacgaagcaaagtatttaaagtgtcgtttaatgcacttgaattagtagcattagcagtttctggataaacactcttaggaacgataccatatttttcaataataccgcaaagcatgtcccattgaccgccgtcttgttgaggagtcgcaaataagaatgaaactttacgatcgcccaagtccttatcagcagttgcgatcacattttcaaagaaccagttagacttttcaaatttatcccagaagttagtgtaattttgagataattcgaagtcctttaacttaaatttcttttgtaatgggtgacgcatagtgtttaaagcactgaacatccagcagcgaccagactgcttttgatcggcagggttacctgtatcaatttcgattgagaaggttggatctaggtcgatcttagtttgtaagttttgactagctttgtagataccgttttcttgagcagcgtgactagccacatcaaaaacagggtggttagctaagtcttgttcaaatttattaatagtatcattgttgatttcttttaccataaaaaaatcctcctttataagtacttaaattaattttatcttattcaaaatgagtcgtctaataatcttatcgattaaatggacgatgataccaaattttgtgaaattgaggatgctgggtgaagtagtcaatgatcataggatcaagcggccaaatgggtaagttagtttcttgagctaattgccaaactttttgcatttgtttttcaagcaaatcctgactattaaattgtggattaataaaaaaatggttcattatccagacattactgtctttgcgagcgattttatctaaggtaacgctagataatagtatgtcttcttcattttttatagtgaaaatttggtgcgtattttgcttattcataaaaaattcctttttaaaaaaataatctcattttttttgcgtaataaataatagagagctatttattttgtgttgactaaaaacattgtaaaatagataactgtcaaaataaaagataaatggagctttggaatgaaaacacgtggatttgaagtagtcaaaaagtatcaagatcaggaaattaatcttcctcgcagacagaccctagccagtgcaggctatgacatcgaagcggctgaagacattactatccctagcatttggcgactaaattttgtgcgaatttttaggttgattagaaatggacaccagctgtatgagcgcgactatgagatggcggatcagattttaaagccgttgttagtgccaactggacttaaagcttatatgccagaagatgaagtgttgattttagctaatcgttcatctaatacttttaagcgtaatctagctttgccaaatgggatcggcgttatcgatgcagattattacaataatcccaacaatgagggcgaaatttttgtacaaatgattaattatggcgtacggcccttgcacatcaagaagggagaccgtattgctcaaggcatttttatcaaatacttgaagaccgacgatgatgatccaattagtcgaaaaagagttagcggctttggatcaactaatgaaaagaagggtgattaatggctagagtaaaaacacaatataagtgtcgttcttgcggctatatttcggcaagttatttaggccgctgccctaactgtggtgcctggaatcaatttgaaaaagaaactgaagaagtgcaaaagcgttctactaaggcaactgctagtcgtttgattcagaagactggattaaatgaaccggtaaagctggataagattaaagctgaaaaagaagaacgaattgtcactaaatctgaggaattaaaccgcgttttaggtggtggtattgtgccaggctcactagttttaattggtggagatcccggaattggtaagtcaaccttgatgttacaaattatgagtgacttatctgaaaaatataaggtgctttacgtttcgggagaagaatcagctaaccaaatcaaattgcgggctgaccgactgggtgtaggtcaaagtaatatgctcttatatccagagactgacatgcatgatattcgcgaacaaatcaatgatgttaagcctgactttgttgtaatcgactccattcaaactatgaatgaaccaagtcttgattcgatgactggctctgcctcacaggttcgtgaagtaacaagtgaattaatgaaaattgccaagatggatgccattacagtttttgttatcggccacgttacaaaagagggtgcgattgctgggcctaagatcttggaacatatggtggataccgttctctattttgaaggggatgaacaccattcttaccgaattttgcattctgttaaaaaccgttttggagcagcaaacgaaattggaatgtttgaaatggttaatgaaggcttaagagaggtaactaatccatcatcaatttttctggaccaaagattacctaagtctactggctctgctgtggtggtatcgcttgaaggaactaggccacttttagcagaaattcaggctttggttactccgacagcttttggctatgctaaaaggaccacgtcaggtatcagttttaacaaagcttcattgctgctagcggtgcttgaaaagcggggaaacttaatgttgcagaatcaagatgtctatttgactgcaactggtgggattaaattgaatgaaccagcaattgatttagcaattgccatggcagttgcatccagttataccgataaagaaatttcgccgacagattgttttgtaggcgaagtgggcttaactggtgaagttcgccgagttgataaaatcgatgcacgagtaaaagaagcggctaaagtagggtttaagcggatctttattccacggcataatatgtattctggattaaaagatcatggcattgaagtaattcccgtttcgagtattccccaagctttaaaattagtttttggctagcattaattgaattcttactatataacgagtaaactaagattgtttgaatttactattttttgaaagaggcatgaattttggctaaagaaaaaatccgtgtaagatatgcaccaagtccaactggtcacttgcacattggtaacgcacgtactgcactttttaactatttattcgctcgtcataacaagggtacgatggtcttgagaattgaagacaccgaccaaaagcgtaatgttaagggcggttctaagtctcaaatggaaaaccttcactggttaggaattgactgggatgaaggtcctgataagggtggcgactatggtccttatcgtcaatcagaaagaaaagaaatttaccaaaagtatattgatcaattgatcgatgaaggtaaagcatattactcatacaagactgaggaagaacttgaagcacaacgtgaagaacaacgtgctgcaggtgttgcacctcactatacttacgaatatgagggtatgactgctgatgaaattaagcaagctcaagatgaagcaaaggctaagggcttaaagccagttgttcgtatccacattccagaaatggaaacttattcatgggatgatattgttaagggacaccttgagtttgaatcagacactattggtggggatttcgttattcaaaagcgtgacggaatgccaacttacaactttgccgtagttatcgatgaccacttgatgaagatcactcacgtacttcgtggtgatgatcacgtttctaacacacctaagcaattagttgtttatgaggcacttggttgggaacctcctaagtttggtcatatgacattgatcattaattcagaaactggtaaaaaactttctaagcgtgacgaatcagttcttcaatttattgaacaatatcgtgatcttggttacttaccagaagctatgtttaacttcattactcttcttggttggtcaccaaagggtgaaaacgaaatctttaacaagcgtgaattcatcaagcaatttgaccctgcacgtttgtctaagtcacctgctgcttttgaccaaaagaaacttgaatggattaacaaccaatacatcaagaaggctgatcgcgacactttgcttgatttagctttgaacaacttgcaagaagcaggtcttgttgatgagcatccaacaccagaaaagatggaatgggttcgtcaattggttaacatctactcagtacaaatgtcatacactaagcaaattgtagacatggctaagattttctttgaagaagctaaggatctttcagacgaagaaatcgaagaaatcaagaatgatgatggccgtggtgtaattgaagaattcaagaagcaattagacctcatcccaagatttacttcagttcaaatcatgaacgctattcaagcaactcgtaaggctactggcatcaagggaagaaagctctttatgccaattagaattgctaccacgcgttcaatggttggacctggtattggcgaagcaatggagcttttaggtaaagaacgtgtattagaacacattgatttaaccttgaagcaaatgagtgctaataatctttaattagataaattgaaaaagaggctgcaaataaatgcagcttcttttttcatctgctaaaataaaaattagttattttgacagaagggacaagtgttagccgtgagagtttataatacactgacgcgtaaaaaagaagaatttaagccattagttccaggacatatcagcatgtatgtctgtggaccaacggtgtataactatattcacattggtaatgccagaagcgcaattgcttttgacaccattagacgctattttgaatataagggttatgacgttaagtatgtttctaactttactgatgttgatgacaagatgatcaacgaagcgagagctgaaaaaacgactgtacccaaattggctgaaaagtttatcaatgcttttttggctgatacgacagcgctaaacattgagccggcgactttgcatccccgtgcaactcatgaaattaatgacattatcacttttgttaaaagcctaattgacaatggctatgcttatgaagtagacggcgatgtttattatcgtgccaaaaagtttaagcattacggtcagttaagtgatcaaaatattgaacagcttgaagagggtgcttcagagcacattaacgatacagaacaaagccgcaaagaagatccaatcgattttgctttgtggaaggcgcaaaaggaacccgatgaaattggttgggattcaccatggggcaagggacggccaggctggcatattgaatgttctgtcatgagtaccaaatatttaggcgatacgatcgatattcatggtggtggtcaagaccttgaatttccgcaccatgagaatgaaattgcacaaagtgaagctaagaccggtaaaaagtttgttaattattggctgcataacggttttgtaactgtcggtaaagatcaggaaaagatgtctaaatcactgcacaatttcgtaacagtgcacgatattttaagggaagttgatccgcaagtactgcgcttcttcatggctagcgtacaatatcgccgccaaattaactattctgctgaaaatttagcacaagcagctacaattttagatcgctttaagaatactgtgactaatattaattaccgtctagcagatgatacagctagtgaagaatcagccgaattagcacaggcgattatggcaactaacgaaaaatttgaacaggcgatggacgatgactttaatgtccaaaatgctttaacagctatctatgatttgttgcctgtagttaatgccaacgctaatgctgctagagctgacaaacaagaattgcaaaagtttaaagagaaattagctagttggttattagtgtttggcgtggatactaataagctttgcgttaaaaatgctggctccaatgacgatgaaattgacgctttagttaaaaagcgtgatgaggctcgagcaaataaagattgggcaactagtgatcaaattcgtgatcaattaaaggaaatggggatcactattcaagataccccacaaggaactaggtggactcgtgactaaaataaaaaaactagcggaagaggatgttaatccggatactttaaatggacaaactttagcctatttaggggatgcagtgtatgaagtaattattcgcagacacctagttaaaggcggtatcgttaaaccacaagtattgcagcgtgaagcgactcactatgtttcagctaaagcacaagctgcgttggtaactaagatgcaagatgaagaaatgttaacggatgatgaattagctgcttttcgtcgtggacgtaatgctaaaagtcatactaaggctaagaatactagcttgaaaacataccaattatcaacaggctttgaagcaatgattggttatcttgatttactggggaaaaatgatcgagtggcagacttaagcaagtggtgtattgatactgtagaagaggacgggctgaaaaattatgacttcaaataaagattttgtctttggacgccatgccggacttgattatttaaaaacacaaagtgccgacaagattaataaggtttttttgcaacacggtgtacaagaagaatttgctaatcaagtttatagtttagctaaaaaaaagcgtttagttgttcaagacgtgcctaaaaataagcttgatcgtttggttgctggtggcaatcaccaaggtctagttttagcaatttctagctttgaatatgcagatttagatcagttgctggacaagtatgatgcagaaggtaaagaaccatttttattaatgttggattctattgaagaccctcacaatctgggatcaattttgcgttcagccgatgctactggcgttgatgggatcattattcctaagcgtcacgcgactggcttaacttcggtagtagctaaaacatctacaggagcaattgattatgtgccagtagcgcgcgttaataatttagttcaaactactaaagaactgaagaaacgcggttactgggtctttggaactgatatggcaggtactgattatcgtgaatggaatgcccaaggcaagactgtactggtaattggtaacgaaggtaaaggcatcgccccattacttaaaaagcagatggatcaaactattactttgccaatggttggtcacgtacaatccttaaatgctagtgtggcaaccggggtattgctttatcaagcttataatagtagaaatccattagtaaaataaacagaaagtagacaaaagtgtgagttttgtctacttttttagatacataaagctcatttctgtccattaaacatgtgttttcttctcaaactcaggggacagtctgtattctttgaggtggaggataaattgaatgattaatgaagagaagctgattaagaaagtacgggcaggagatgaccaagctttagaaaaattgtttcatttatatgagccgttagtaaattcaatcgtgaagcaattctatttgcatcattatgatcgcaaagattgggatcaagaggcaatgattgtttgttatgaagcagcactagttttctcgcctcaaaagggaaaatttagcagtttatataaaactaaattgtttaatcatgcacggaccttggtacgttacaatatggcacgtcgcaggcaaatctatagtcaatcgattccgctagaaaaggcggacattcaaggaagcgtgaatgaaccatgccgctctgaattatcgattccagttgatgagacttacaataattttgttaatagcttgtcacacgttgaattaattgcattattaaccataattggcgagataagtacagagtatgcgattgatcatctaaatattgaagcaatgaagctggtcagagctcgagcacgaactttacagaaaatgcggaaagtgcttttttgatagctgatcaaaagaaagtgcggtataataagtaatgtagaatattttaggaggtaatttaagatggcagacgaaattattaagactgcattgttagaccgtcacatgaaggaagcttttgactggagtgattcagatatgccagttagagatgccctttgggactactttatggaaaagaatggtagagataccatgaagacggaagaagatatgcttccatttttgaaagactcagacgataaaatcgaagccttcgttaacgaaaatcttaagaagtaaatccgactaaaaaacaatgttctacgcaccgtggtcacgcatagttttgaccactaagacagctaccttctccggtggctgttttttatactaaaattaagaaagaattttaaagatgaaatatataattggcatagacataggaactactgcgactaaaggtgtgttgtatggcgaagatggaagtgaagtagctaaattggcaatttcctatccattgattcaggaagaagcggggcaggctgaagaagatccacagcttatttttgacgcggtacagaaaatgatttatcaattaagtcagaaagcatctggtcaaattttggcaatttcttggtctagtcagatgcacagcttaattggcttaggtgaaaataatgagttactgacaaacagcattacttgggcagataatcgtagtagtgatgtagtgcagcgggcaaaaaagtcgggctgggcaagaatgatttatcagcaaacggggatgccgccacatccgatggcgccagtgtataaattgctgtggcttaaagaagaacagccaacactttttgcacaagtaaaaaaatggattagtatcaaagaatatattatttggggcttaactggaaaaatattaactgatacaactatggctgctggcagtggaatgatgaatttaaaaacgctgacctgggatgaaaagatattggctcagattgggctagatcaagttcaattgccgacaattgctgatcaacaatctactgtgggtaaaattattccagaatatcgtgctaaattgggtttaaatgatgaaactcaaatcgttttgggcgcaagcgatgggtatttgtcaacgattggtgtcggcgttttggatgagaaagattttgcattgaatgttggcacttctggtgcggttagagtaattgcaccgaaggcaattgttgatcaaaagaatcgctttttctgttaccctgttgacgccaaacattatttgcttggcggccctgtaaataatggtggaattgtgttcgattgggccagaaaaacaatttttggcccagatgaaacggcagaggacgtcttaaatgtggcacaaactgctccggctggaagtaatggattgttgtttcatccttatcttggtggtgaacgagctccaatttggaatgctcaagcacgtggatcttttgttggcttgacgcgaaatcacactaaaccgcagatggctagaagtgttttggagggaattgtttttaacttgcttggcgcctctcaaggattgtttgatcaagtgggacagcctcaagctttacgtgttactggtggctttgtgcaaagtgattttgttagacaattaatcgcggacatttttaacttaccagtgattgtaattaaaaatgagcagtgtggtaccctagcagctatgtttttagctaaaactgcattagaagataagccagacctggaaaagattaaaaagcgtactgccgaaagccaagtttattttccaaatccccaaaatgtagcgatttatcaagaattgattctcgtttatcgaaaaattgagcatgaacttgaagcctcttatgaagatttggctcagtttcaagataagcatccacagaaatttgagtaaaacaaaaaagacgcattgcgtctttttttcatagattgattaactattaagcattttcaatatcttcaacaatctgatcaactgtcatacgattgtctttcaaaatttctttcaaaggtacttgatcagtatagacacgtttttggccgtagttgagtactttaatatccttgtcgccaaggtaggaagctactttttcaccaaaaccgccgtccaaaatattgtcttcaatagtaacaataactttgttttcttgagtcaatttgtctaaagcggcagtgtctaaaatattagcagaaactggatttactaagctagcacctgtcttttcagccacctttttacctagcatatcgtacatatcacctaacgctaaaacagcaacatctttacctggtttaatgtcgtacttgatttctgaatagtcaacagcagtaatttctttaccttcaggaacatctttggtaggcatcttaattgctacaggatgcttcttttgcttaatagcccattccatcattgccttttcttcggctaagttagttggagcaaggtagatccagttaggcaagttagaaatcattacttgatcaaacacacctaggtgagtcttacttgtgccagaaatgccaccaccagcaaccatcattacaactggtaaatcattagcggcaacatcgtgtgataattgatcaaatgcacgttgcaagaaggttgaattttcaaataaaactggagttgcaccttccttagccattccggcagcgaaggcaacggattcttgttcagcaattcctacatcatggtagttttcaggatatttgtttttaattctgtctaagccgaaaacgccgggaattgcggcattgatagccatgatcttctcaccattattgatgtgatcttcaagaacatcgagtgcaatagagctagcggtcggaccttcaggcattgctactgtcgtcttgtcagtctttaaatcgaatggcattacccagtggtgtgcttcttcgttgtcgattgcaggttgataacctttgcccttgagagtgttgatatgaagcaaaatagggtgatcaacatttttaactgctttaaaagcatcgatcattgattggatatcattaccatctgcgacataacggtaatcaaagcctattgcagtaaatggattttctttggtttcaccattagaatcacgtagtttctttaaagcagtaactaagccaccgacgttatcatcaattgacatttgattgtcgtttaccactacaactaagttatgcttttcaattgcagcgttgtttagcccttcataagcaaggccaccggtcattgaaccatcaccaattaaggccatgatgttttcatgtttgcccattaaatcgcgtgctttagccatcccagttgctaaggcaattgaggtagatgtgtgaccgacggcgtaatagtcatatgggctttcatcagggttgctatatggagttacatcttcatagtggtctggatcaagccaagcgagtgcacgtccagttaacattttgtgcgggtaagtttggtgggaaacatcccagacaatcttgtcctttggtgcatcaaaaacatagtgataagcaattgtagcttcaacgattcctaagtcgggacctaggtgaccaccttcagcggcatctttttctaagattagagtcctaatttcactggctaacttttccatttctggaagagataatttttttaaatcagcaggaccagaaattttattcaatagatattcaggatgtttatttattattatgtcctttctaacaagtagttacacttattatagataagcaaaaatcaaaataaaaatatttagttgtaattgagctcgattacttttagtaatgtaaatcagattattgacgtaggaagggacaacagtataaaatactgagtaagtatgtgtttttataaaagtttggaagtgagattatggcagtgaaaaaagcagccttagcctgcagtgtttgtgggtcacgcaactactcaatcaccgcaagtaagaatcgcactcagcgacttgaacttcaaaagttttgcaaacattgcggtaagaaaacattgcataaggaaacgaggtaaataaagctaatgattaagttttttaagagtgttggtcatgaaatgaaattggttaaatggccatccgcaaagcaaaatagacgtgatacagcaactgttattactagttcaattttatttgcggcatatttaggtgcacttgactggctcttcacttggttgactcaaagattaatgtaattgctagcataattagaaattatcagcgattcatgctataatattgacagctaaaagaaaacctctgtgggaggtttttttgtttacctaaaatttaaggagaaaaatatggtcgaaacagcacaaaagaaatggtacgttttgcatacttattcaggctatgaagacaaggttaagtcagacttgttgtcacgtgcgcaaagcatggggatgcaagactacattttccgtgtaatggttccagaagaagaaaaagtagaaaccgttcgcggcaagaaacaagaaattgaagaaaagattttcccaggatatgttttagttgaaatggtaatgactgatgaaagttggttcatcgttagaaacacacctaatgtaactgggttcgttggctcacacggtggtggctctaagccatcaccacttcttgatgaagaagtaacgcgtttgcttaagaatcaaggtcaacctgctaagaaaccagtagttaactttgatattggcgaatcagtaactattactgaaggtgcatttaatggcatggtaggtaagattactgatattcaaccagataagtacaaattatacgtatcagttgacatgtttggtcgtgcgactactgctgaacttgattatgatcaagttaagaagcttgacgaaaacgaataatatttagaatttttagttgtaattgtacccaaacgatgttattctaatacggtacgtttattattgtgggaggagaaaaaaggaaaattctccattttaaccgcatcacggaatcaaggaggttttgaccgtggcaaagaaagttattaacgtagttaagttacaaatcccagctggcgctgctaccccagcacctccagttggtcctgcattgggtcaagctggtattaacattgttggttttactaaggacttcaatgctagaaccgctgaccaaaagggcatgattatccctgtagttattactgtatatgaagatcgttcattcgaattcattactaagactccaccagcaccaattcttttaaagcaagctgctaagatccaaaaggcttctggtgaacctaataccaagaaggttggtaaggtaaccaaggaccaagttaaggaaattgccgagactaagatgaaagaccttaacgctgctgatattgaagctgctatgcgcatggttgaaggtaccgctagaagtatgggtatcgaagtcgaagactaatcctgttatttaggtaacaaattaggtgggagagttaagagaagctcgtttgaccacatatacaaggaggaaatcacatgccaaagcatggtaagaaatatttagatgctgccaagaaggtagactcaaataaattatactcagtagcagaagctatgaaacttgttaaggaaacttcatacgcaaactttgatgctactgttgatgtagcttacaacttaagcgtagatcctaagcaagctgaccaacaaattcgtggttctatcgttttaccaaatggtaccggtaagacccaaaccgttgtagtatttgctgaaggcccacaagctgatcaagctaaggctgcaggtgctgactttgttggctcagatgacttggtagaaaagatccaaggcggctggttagactttgacgttgtagtagctactccaatgatgatggctaaggtaggtcgtttaggtcgtattcttggacctaagggcttaatgcctaaccctaagactggtactgttaccatggatatcgaaaaggctgttaagaatgttaaggctggtcaagttgaataccgtgttgaccgccaagcagctattcacactcctattggtaaggtatcattcactgaagaccaattagttgaaaactttgacgcattacgcgacgttatcttacgtgctcgtccagcttcagctaagggtcaatacattaagagtgttgctgtttcagcaacctttggcccagggatcaagcttgatccattaaacttggactaatttaaaatagactattaaaagcctcgctattgcgaggcttttttctattcattgacctattattttcgaacatggtatcataaattgaacttacaaatctatatattaaggataatgtcatgaaaaagcattctattggaaaactagtcattatgttggtgctaatgctagcttttgttacgggctgtgctaataatggttctaaaatcactattgttggttcaagtgcaatgcagcttttagcagaacaagcaggtaatgattatcgcttaagtcatcaagacagcaacattgtcgtgcagggtggaggatcaggtacaggattgagccaggttcaagctggtgcagtccagattggaacctctgatgtttttgccgaaacacaaaagggaattgatgccaagaaacttcgtgattataaaattgcagtagttggtattgttccaattgttaataagggtgtaggtgtgaaaaatgtttcgcaaaagcaattgaaacagatcttcactggtaaattaacgaattggaagcaactaggtggcaaaaatgaagccataactgtgatcaatcgttctaagggaagtggtactagatctgctttcgaagatataattttacaaggaacaaaaccagttaagtcgcaagaacaggactctaacggtgccgttaaaaagattgttaattcaacgcctggtacgattagttacttgtcctttccttatgctcatgataccaatattcaaaagttgagtattaatggggtaaagccaactaacaaaaatattactactaataagtggaatatttggtgttatgagcacatgtacactaagggtaagcccaacaaacaaactaaagcgtttattaattatatgttaggtgaaaaagtacaaaaagatcttgtacctaagattgggtacctcagtatcaatgaaatgaaagtaactcgtaatagcaagaatcaagttacacaaataggaaaatagttcatggataagaaggataaattaaaggaagttgttgatcaagcaattgctagtcaacacgttccacacgttaaattaaaaaagatgggtccgactagtgttgatattgataaattaaccaagccatctaaagagactcatcaagaatattggggcaagggtttaacttacttggcaattgttttgattattgtcttagttgtctcaattatcggctttgtcggctatcacggcttggctacttttgtcagcgatcatgttaatgtcattcactttttgacttcaactgattgggacccgggtgagggcaagaatcatgttggtgctgcggtaatgatcgttacttcgttcttagtaactcttttagcagcattggtagccaccccgtttgcaattgcaatagctctttatatgactgaatattcatctaaaaagggtgccaatttcttacagtcagtgactgaattattagttggaattccgtctgtagtttatggtttcttgggattaactatcatcgtgcctgtgattagaaaactatttggtggaacaggttttggtattttagcagctacgttggcgttgttcgttatggttttaccaacaatcacatcattaacggttgatagcttaaaggctgtaccaagtcattttagaaaagcttcaatggccttaggttctacgcattggcagactatttatcatgttgttttgcgagttgctacgcctagaattttgacggcggtaatcttcggaatggcaagggccttcggtgaagctttagccgtacaaatggttatcggtaatgccgtcttgatgccatacaatttggtcagtccatcagcaacattaactagccaattaactagtcaaatgggaaatacggtcatgggaactttgccaaacaatgcattatggtcattagcattattgcttttaattatgtctttggtatttaatttcctagttaagttaattggaaagaagggacaaaagtaatatggatgcaaaaaagaaagataaattagctacggcgattatctatattttggtaggaattgttgtattaattttggccggtatcctaggtgatatcttgattacaggtattccacatttgtcctggcgctttttgagttctgaagcctcatcataccaagctggtggtggggtacgtgatcaacttttcaattcaatttatttgttaattttgactactattatctccttaccaattgctttaggagcagcaatttatctagcagaatatgctaaagataattgggtgaccaatttgattagaactacaattcaaattcttagttcattaccatcaattgtagttggcttatttggttatttattgtttgtagttcaatttggctttggtttttcaattatttctggtgctttagctttgaccttttttaatttgccaattttaactagcaatattgaagaagcaatcaagggcgtcccacaagatcaacgtgaagcaggattggctttaggattatctaattggaaaactattcgcgggattgttttacccgctgctcttcccggaattttaactggaattattttgagtgcgggccgaatcttcggggaagctgccgctttgatctatacagcgggacaaagtggatcaacagtcaattatgcggactggaatccatttagtccaactagtccacttaatgtaatgcggccagccgaaacattggcggtccacatttggaaagtaaatactgaaggaattattcctgatgccacgattgtttcagcagctacttcagcgctcttggttattgtggtaatcgtatttaatttaggtgcacgttatttaggcaataaattgtaccgcaagttaactgcagctaagtaggtgaaataatgcaagatttaaaacctagctatattaaaacttttgcaaatgatgatttggaattatcaactgaagatttaagtgttctttatggcggtaaggtacaaaaattatttgatgccagtcttcaatttaaaaagaacacgattacagctttgatcggtgcttcgggttcaggtaaatcaacatttttacgttcattaaatcgaatgaatgatcgagtagcaactgttaacggaaaaatctggtttcatggtttagatgtgaataagcctaatatcaatgtttatgaattaagaaaaaacattggcatggtttttcagcggcctaatccatttcctaaatcaattagagaaaatattgtttatgctttgaaggcagatggacataaggatcgggcagaacttgatcgagttgtagaagaaagtttgcgtgcggctgctttatgggatgaagttaaagataagctggataaaagtgcattagcattgtcgggtggtcaacaacagcgtttatgcattgctcgtgctttagctgttaagccagaaattctactactggacgaacctgccagcgctttggatcctgtttctacttctaaactggaagatacccttaagcagttgaggagtaagtatactatgattatggtaactcacaacatgcagcaagcctcaagaattagtgattatactgcattcttccatttaggacatgcaattgaatataattcaacggcagagatctttactaatcctaagggtaagattactgaaaactatattcagggaagttttggataaaatgacaacaataatttcagcaaaagatgtacatctaagttatggcaattatgaagcactgcacgggatcagtcttgattttaagaaaaaagaattaacagctttgatcggtccaagtggttgtggtaaatctacttttttacgctgtcttaatcgaatgaacgatgacatcgaaaacattaatatcacaggtgaaatcaagtttgaaggccaagatatctataattctaaaatggatttggtcagtctacgtaaagaagtcggcatggtttttcaacagccaaccccattcccgttttccgtatatgacaatgtggcttatggcttaaaaattgctggtgttaaagacaaagagctaattgatcagcgggtagaagagagtcttaagcaagctgctatttggaaagaaacaaaggacaatttaactagaaacgctcaagcattttcaggaggacagcagcaaagaatttgtattgctcgtgcgttggctgttagacctaaagttgttttattagatgagcccacaagtgcgcttgacccaatttcaagtagtgagattgaagagacactgatggaactaaagcatcagtatacttttattatggtgactcacaatttgcagcaagcaggacgaatttctgatcagaccgcctttttgatgaatggcgatttgattgaagctggtccaactgaagaaatgtttattgcacctaagaaacaaatcacaagtgattatcttaacggtcgttttggttaaaattttgaggtaaaaagatgcacgaaatatttttggatgaactgaaaaaattaaatacacaatttatggaaatgggtgtcctcgtcaacgatgatattgaccatgctacccgtgcttttgttgatcatgataaaaagactgcgcagtcaatggttgatgatgaagaaaagattcctacagaatcaattaatattcaaaagcaagccttaaaattaatggccttgcagcaaccggtagctactgattttagagttgttatcagtattttaaaggccactactgacttggagcgaattggtgaaaatgctatgagtattgctctggaaacaatcagagtaaaaggtaatcctcgtattccagaagttgaagaaattatttctaatatgacacataatgtgcgacatatgttaattcaagttttaactgcttacgtgcaagatgatgaaaaaatggcacgtgaagtggctagtcgtgatagcatgattgaccacgactatgtaagagctcgtcaattgatcgttgatggaattgaagatgatccttcgcgtgcaatggcttcatcaagctattttgtagttacccgtttacttgaacgaatcggtgaccacattgttaacttggctagctgggtggtttataaaactacgggtgaactagaagaactatctaattcaactgaaagtgaaacgatttaaataaagtaccgtaaaaagcggtgctttttttgtaataaaaaacagttgatacgcgtggtgctagttaaatcgttctagacaatatgccatattataagctaaaatagctatttctagccgctgttgaaagcctactggacttcttgctcgattattctcagcgttgtaataactaagcaaagaaaagtcgctttcaatgctttttctaattgccatcatcgcttactattgcgtggaccttgaagccataataatagactttcttggttgctttataaccaatatcagctacgccccgaaagatcttgacacgataattgcaaacaggctggcaaactggcactgggaaactatcaataatcaaaaattctccagctgtctttacttcttgattccaagcctgacggatacaacgaattagaggcaagagcattcgagctcgacggttaaaacgagaatgagataagccaacgaagaatttacagaatcttcgttgagattcaattccaatttcagtttgccaaatgagcatcgctaagatagaactatcaggaagcttggtctgatcaacatttttacgatgtttaagtccatcaggcgcataaagcttatatagcgagcgacaaatcacatttaaccgattaaaactaacttgtaaatggtgagaaaaacgcttaagcttgagatagttcaattagatcagactcttttctatttaaattacctacaacttttattaactaaaacgatttaactagcaccacgcgtataattaatgaatatttcaaaaactgtattggcgttataccaaacaattattggtgaaaaacagaaacgcttaatcaagacagtagatgcttatttggacattaactacggtgataaagtttatcagataattgatcaagttaaggaacgtaatattccaattttgtcttttggggatatagcagatcaaaacaatacttactcaaactacactgtttttggcaatgatcaagttgacgagatggtggataaaattaatgaaatcatcaataaccaaaataaataaaattatcttttgcattttacagcaaagcttgctataataattaactgtaaattctacctaagactcgggtggcatgacgcctcaaaatcccgccgaggccagaagatgatgaagatttttatgctccatgtctttcggcatggagtttttgcttttttaaggccttatagaatttatcaatgtgatcatggaggtgaaataatttgagtaaagctgctattgctgaaaaagaaaagttcgttgatgcatttgctgaagaacttaaagctgctaaggcaatcttggtaattaactaccttggtttgactgttgaagaagttactaacatgcgtaaggaacttcgtgataacgatgttaagatgaaggttatcaagaacacctacttaagacgtgctgctgctaaggctggtatcgaaggtcttgatgatacttttgttggaccaactgctgttatctacactgataacgctgatgacgttactgaacctgcacgtatcgtttctaagtacgaagatgactttgacgttatcgaaattaagggtggtatgcttgaaggtaagttgacttctaaggatgaaatcaaggaacttgctgctatcccaggccgcgaaggtttgctttcaatgcttgtttctgtattacaagctcctgtacgcgactttgcatatgctgttaaggctgttgctgaatctaaggatgaagactcagctgaataataaagaaatttatatttaatatctaaattctaatttttcggaggatacttaaatggctttagatactgataagattattgaagaattgaagggtgctaccatccttgaattgaacgaccttgtaaaggctattgaagacgaatttgacgttactgctgctgctccagttgctgctgcaggtgctgcagacgcaggtgctgctaagtcagaattcgacgttgaattgactgaagcaggtcaagaaaaggttaaggttattaaggcagttcgtgacattactggtcttggccttaaggactcaaaggaccttgttgatggtgctcctaagaacgttaaggaaggcgtttcagaagacgaagctaacgacatcaaggctaagcttgaagaagttggtgctactgtaacccttaaatagttacagcccaactgggcaactatgaataagctctttgctatgtgcgaagagcttatttttttgtataattaaatttatgatgaaagatatagaaagaagactaacgccatatcaatgggtaatggccattttagctattatttcgatttttttgattattttagattttgctgcggttattaatattgatgaaccgactagtaaatggttctggatcaatagtgcaattgtagtatattttgcaattgattattttcgtggcttacatgcagcagaagacaagaaactatatttcaaaactcacatttatgacttgctgagtattattccaatggggttattgtttatcagcttaaatatttttaatttatctgggctggtatcagatttgcggcatttgcgtttgattcgattagctggtttgatgggaaaattacgtaatatttttcatactaatggcctactctatgtaatcttttttacaattacatttttgttggtaggagcggaagcattcgcaatcactgaacatgtaacgctggatactgctttttggtgggtcatttcaacagcttctactgtcggttatgatgcaatttttggcaaaacaattccaccgcatagtattgtaggaaaattcgttacattagtaatgatgcttttaggaattggaatagttggtatgttaacgtcatcgattacttcgtatttgatgaggagaacgaatggcgcgaatacgttaaaaacgcatgataatattcaattaattttgaaaaagcttgataatttagaaaagcaaaacaaggatttggctgatcaaaacaaaaagatgcaagcacagattaatgaattgaaagatgtacagaatacaacggagctgcataagataaaagaatggtttgagaaaaagaaaggttagttaaaatgagtgaagaaaaaaatcaaatgtattttgcgactgatcctactgccaagcatgatcaacatgttgttgattatcatgtggataatattgatttgaaattcacaacagacgcaggtgtcttttctaaaatgagggttgattatggctcaggcgtattgatcaaggcaatgaaagatgttgtttttcctaaggataatatcttggatgttggtaccggttatggtccgattggtttatttgcggctaagttttggcctgatcaaactgtagatatggttgatgtaaatgagcgtggattaagcttggcaaagcagaatgcacaagttaatcacatagataatgtaaatatctattcctctgattgttatgaacatgtggataatgataaaaagtttggtctaatattaacaaatccgcctattagagcaggaaaaaaagtggttaatgagattttactgggagcaaatgagcatttggttaatggcggtatcttattagtagttattcagaaaaagcagggagaacctagtgcgcgtaagctgatgaccaatacatatggtaattgtgaaattttaacaagagataaaggctattatatcttaaaatcaactaagaaataactaaataaaaaatgcttgaaagtactattaaataagcattagactttataaaagtgctttcaaaactggatttatcctcgtataataatcttgtaaatatcaagagtatgtgaagaggataattattatgaaaaaggcttggaaatacattgttgcagtattgattgtaattgttggtgtgtttatgttaggtatgatttccggtgataacgagactgctgctccagctggaattgctgcattatacttgatcttgtcaggaatctttttctaccacaactttagaaatcgtaacattgaaccattgtaaaaagtaagcagctagtcgcaaatcaatgtcattaagttaagacattgacattatatcgacagcttttaaagatcgaatcattttgattcggtcttttttctttttaaaataaaaagtgagcagagtttatttgcctttctgctcactttcgtcatattatctggtctttcatagaaagctgtgcctcttatgaaatcccttcactcaaatattttaaagctgatggatagtattatcaataaaatcgctgacaacattcacgatttctctgtatctgatcaagcttttactcgctgtcgtaagctcaattccactgatttgattaagttaattcttaacatgggagctggcagcctgaattcggaaatttttcatgcttttcctgacataaattctagaatgactgcttcggcttttgaacaacaaaaggctaaattaaagcctgaatgctttaaagaaattatgttagaacttagccgggcaaataatgtactgcaattattagataatcaatacttagttgttgcgattgatggctctgattttgatcaaccttttaatcccgaatcagaaaatatttttcgaggtaaagatggtcgaatatactgtcaacttcatgtaaatgctctttatgatgtcttgaataaattatatttacttaaacttcccacactaaataagccagtaatctcttgatcttgcttggctttaggcttctatattatttttgctagttttctttaacaatttttgcatgtatttgggtaaacgattgataaagtcagccgtgaattcagctatttgtgcttcactggcatgaaagacttgctttacgctggccagcattgcatcagtaatcaattgcaaggaatggctaaaagtaatgtccgccagctcatcaatcatgcaatagaacagctcgcctagcgtgcgttcatcttcatcgtcccgcttggcaactgacataagcatgtagcgagtaaaaactatggcaacatgagcggtcaaagcatcgtaagacaggccatgatattccgtacttagttttagataacttttgcaagttttgaaaaaaacctcaatatcccaacgcttgccgtagttgcggataatttcatcttcgctaagcgacatgtcggtacaaatgattgccagccaatccttgcgattggcacggtttctaacgcagacaatccgtgcatctattttagcaccgtctttgtcctggcgtccgactttgactgggattgacagcaggtagcgagaacggccgcatcgctttttacagctgcgataaatctgtttgatgtttttgcgttctccctcaaattcatatttgattttggagctaaccttaaccatggcaatcacatccagcttcctttgcttgagctggacgatttgatgtggatttgagaaccagctgtcaaacagcacgtacttggcttgatgacctgctttcatagcttggtcgattaaattaaccatcacgtctgtgcctttagtccgggcaagcatacgtctttggccagcaatggtgcactgatcaaaaactttattttcgccaatcatattctgtagcttctgagaagacagcagcactgaattgattggcatgaaagaagctccatcagtccagcccagggtcatcatgcgaaaacctttcttgtaagtcattgatacatggtcaaaaactttggcgactaattctgttttcttgaagccggtcctagagaagtaggaatcatcgacaacaaagcaatcagcccgtttttctgaagtcaaagatcgcaagtggttattaatgatttgcgcagacagaagtgtggtgaagtggagccaattgacgtgaacgttgcgcataaaacggtaatatgagttcttggaaaaattttcttgaaaatgatccattttcagctgcatatataagctgcggtcacgaaagacattgcttaaaacgtaaagaaacaagctgaacaggctaatgcctttttccttgcggaagccacattttctcaacagcttgatcacctgaaacttcttgatgaagctgatgattgagtttgaaaatagttgttcattttgttggtcaggagatggtaaaatagacattggcacaagcctttcatgcaaataaattatgttttggtcaatataattatagcaatgaaaaggacttgtgccttttatatttgtcaaaacacgcagaatcacaatgaaacaagcaattttgcgtgtgggaagtttaagtatttagacatggttatccaacccagacaaaaaatggatgaacgtgaggcagccttaactatgttaaagaaattagcccaacaagaaaaagatttcttagtcctgatggatcgtggctatattagctttaatttaattgaaaattgcaatcgattaaaacattgccactatgttatgcgatcaaaatccggagatggtgcttttaaagaaattgtagctatgtcgaatcatgaatacgatattgacttatcatgcagagtaacttcgtcacattattattatgtcacccataaagatacagaaaagtttcttcacctgattcttcacaaaaagcatcactataaagctgttcgttcaaaaaataccagagatcaacgctgggattttgaggatatgtgtgatgttagatttagagtttgtaagtttagaatcaatccaccaggttcagacgatgagtgggaagtcctcatcaccaatttagatcgaaatgaatatcctctagctagaatgaaagagatctatcatcttcgctggggaatagaaacttcttttagggagcttaaatatgacttaagcggcatacagtttcattctaaaaaagatcaatttgtttatatggaaatatacgcccattttgcaatgtataatgccgtgagtttatcaataattgcgagctcaaaaccgtatactcagggaaaatatcaatatcaaatagattttaaaatggcctgttgtatctggcgacgatattttagtataagtgataattcagataaaaacttcacacaattactgctggatgtggcattttatttaacgcctattcgaccaggaagaaaagataaacgaaatctaaaagttaaattagtagttggctttccttatcgtctagcagcttgaactaatttaaacgactatcttaagatggcttatttgtgctatcaaaaaagacatttatcgaataaaataattcgataaatgtctcaaaaagtgtcatcagattagtcaatgtcttaacttaatgacattggtcgcaaatagctgcttttttgatacaataaataaaaacgatgaattgagaagtgataaaatgctgtctggcgaagataaaaggaaatacatgcaattagccattgaccaggcaaaagaagctgaaaagcaaggagaggtgccgataggggcagttgttgttgatcctgatggccgcgtagttggtactggatataacaggcgtgaacttgatgaagatgctacccaacatgcagaaatgattgcgattaaagaagcttgcagtaagttaggcatgtggcgcttaattgactgcagcttattcgtgactttggaaccatgcccgatgtgtgcaggggcaattattaattctagaataaaagacgtttatttcggtgcacttgatccaaaagccggagcttgtggatcagttgtggatttatttagcgtagaaaaatttaatcatcatccgcatgcaattcgtggactgtatcgtgatcaatgtgcacaaatgctaaaagattttttcagagcgattcgtgagaaacaaaaagcagctaaattagctcaaaaagaagtataaaatcagtaatttttaaaacaagatgctggtaatatttactgaaatacgttaacatagttgttgggcaatgtttgacctctgaattgtgtcaggaccggaaggtagcagcactaaggttgttcaggcatgtgccttttttgttagaatattaacagctcttagctcttcgagagctaggagcttttttacttaggaaagagaatttatggcttatcaagcgctatatcgtaagtggcggccgcggacttttgacagtgtgattggtcaagaagcgattaccgataccttaaaaaatgcgattaaacgtggtaaggtttcccatgcgtttcttttcgcaggaccccgcggaactggtaaaacatcttgtgctaagatttttgctaaggcattgaattgtactaatttacaagatggtgaaccatgcaatgagtgtgctaactgtattgcagctgatcaaggttcaatgccagatatcatggaaattgatgccgcttcaaataatggggttgatgaaattcgtgaaattcgcgataaggtaaaatatgctccaacggaaggtaaatacaaggtatatatcatcgacgaagttcatatgttgtcgatgggagcttttaatgctttgctgaagacattagaagagccaccagagcatgtagtatttattttagcaacgactgaattgcaaaaagtgcctgcgacgattatttctagaacgcagcgctataattttaagcgaatttccaaagaagaccttgagaagagaatgaaatacattcttgatcaagaaaatattaaatatgaagataaagctttagcagtcattgctcaagtagccgatggtgggatgcgggatgctcttagcattttggatcaactgttgagttacgagaaggaaagtgtcaactatgatgatgctttgcagattacaggctttgcagatcgagaaaatattgaaaaaattcttttagctttgttaaatcaggatgcaggtcaagccttgcagcttacacaagatgagttggctaaaggagctagttcaaaaaacattttagatgaaatcatcgatctaactactaagagtttattaatcgtcaaaaccgatgaaaataaacaggaaacttttttaacaaaagactttattgaaaaaataaagagcgtttctacagatagttattatcgattgattaatttggctaataatgccttgaatgatttacgctatactaatcagcaacagataccactggaagtgttcttagtagaagcaagtagtcctgcaccagtgcagacaagcgttgccccagctaagacagcaccagctcaacctgcacaaggtaatactgatttgcaggctgaactagcagcgctgaagaagcaagtcgttgatttaacacaaaaacttagtgaagtatccaataagccaagtttatcaacaaatcaggtatttcacttggatactgcggtacctaaagtggctcctaagcctgctgttaaaccaaaagagaagcaaactaaaaagccggttagaaaagtcaaaaaaactacggcagaaaatcgcaaacaagtatatcatgttcttgaaaatgctactcgaaacgatttagagacaattaagaatgtctggcctgatttacaatctgttttagctgtctctgaaaaagcactgcttgatgtattagaaccagtggctgctagtcctgaacaagttgttatgaaatgcaaatatactttatggtttgaaaatgcgagcgcagataatgatctgttagggcgcttaacggactatattgaaaagtttgctaaacattcttacggcattgtcttggtgccagataacgattggctggcagttagaaaagaatttgttgaaagccataaggatgagctacttgctaagaaaaagcaacagattgagattcaagaagaaaagtcagatgaaccagaagttgatccagaagtgattaataaggcaaaggatctttttggggatgcagtcaatattaaagactaaagtactatgagcaatgattataatattaaagttttaaataaagaaacaacattacagatcttactagaagatcataattctttgattcgttttggaaatggagaattagatttaattagaggagcaagtattccgtatcaagattatcaaccggaattagctggttcgctaaaagagctcctgttagaaggcagcaatcgccgtttattagtaggattatctgatgtttttgaaaagttagatcgctatagtgattattgccgtaatttttatcaaaatagtttcttcccgaataatcatgacttgttaagagaagttgaattgcaatacaatgtatacgtttctactttcttttcacggccatatattgatttagtagataaaagtcacgctaaagattattttgctaaaatgaaacagctttggcaggatcgtgatcttttaattgtagaaggtaaatatagtcgctcaggcgaaggcaatgacttgttttctaatgctagatcaattagtagactcatttgtccgccaactaatgcatatagtcgcaaaaaagttattgaagatgaaattattaaaaatgcagctaataggttgattttactgatgttaggtcctactgcaaaagtgattgtggctgatttgatagctcagcttaataatcaaatgattgatatagggcacatcgattcagaatatgaatggatgaaaatgggcgtaactaataaggtgaagataccgcataagcatactgctgagtttaattttgatgataaacaagttaaactagagaaagacgacaattttgataagcagattattagtataatagaataataaaggagaaaaattatgagtagaagacctaattttggtggtatgggcatgggcggcatgaacatgcaacaaatgatgaagcaagctaagaagttgcaagcacaaatggcagaagagcaggaaaacattactgctcaagaatttactggtaagtctgccgatgatttagtagtagctacctttactggtgaccgcaagttgaaggacatcaagattgataaggaagcaattgatccagacgacccagatatgttacaagatttggtaattgatgcggttaacaagggcttgaccaaaattgatgaggcaactcaggcaagcttaggtaaatacacgaaaggtttgatgtaattgcaatatccattaccaattgctcatttaattgatgcttatatgaagctacctggaatcggtgaaaaaacggcgactcggttggctttttatacgatggatatgcctgatcaggatgtcgatgattttgctaagtctttagttcaagtaaaaaaagacattcatcaatgtccgatctgtggcaatattaccgaaaaagatgtctgtgatatttgctctaatcctaatcgcgatcaaacaactattatggtagttgaacaaccaaaggatttgatggcttttgaggaaatgggcgaatatgacggactttatcacgtgcttcatggtgttctttcaccaatggatggaattggaccagaagagatcaatatcaagtctttaattacgcgtttgcaaaaaaatgatgctgttaaagaagtgattttggcgcttaattcaactccagaaggcgaatcaactgcgatgtatatcagcaaattaattaagccagctggtattaaggtaaccagattggccgctggtttgtcagttggtagtgacattgaatatgctaattccattactttaaagcgcgcagtgcaaggaagaacggcattataatggctaataaaaagcaagcaaagatcaaagcaatgggtgatcaaaagttggtagccgagattgaaaagctacaaaatcaaattgcattagagcaagatctcgatcaaacaactttagatttatccgaagataattatgtgcaaaatcgaatcttaaaggcaaagtatacttttttgtataatgaagctcgtcatcgaggcacaagatttagtggtattactaatgctattacccagtagaaaaagaccgaatattggtctttttttattttgaataaataaaaaatagtaggactgttaatctctatgaaacttctgtagaatagacatatggaggattttatgagaggttattttgttagttttgaaggccctgatggcgccgggaaaagtacagttttaaaagaagtattgaaccaaattggttcagagcttaagacacaatatcttgtgacgcgtgaaccaggcggttcaaaaattgcagaaaaaattcgcgacattattttagatcctgctaacgacaagatggacaataagaccgaagcgcttttatatgctgcatcacgtagtcagcatgtggaggagattattcgtccagctttaaaggaaggcaaagtcgtattttcagatcgctatgtcgatagttctttagcttatcaaggagcgggacgtgatttaggaattcaggaagttaagcaaattaatgattttgcaacggataaattagatcctgatcttacttttttcttagatcttgatcctgaagtagggttaaaacgaattgaaaagctgcgtccgggtcaggaagatcgtttggaacaagagaatcttgcctttcataaaaaggtttatgccggttttctcaaggtaaaagagacgtatcctgaacgcttcgtaactgttgatgctacgcagccaattgatcaggtagttgctcaagttattgcaacattaaagcaaagaatgccagagttattttaaggattgatttagatgaagttagtaattgcaattgtgcaaaaagaagactctaatgatttacaacgggcctttgttcaaaatgattttcgtgctactaagttagcaacttcaggtggttttttaagtcaaggaaatactacctttttagtaggttgtgatgacgataaagtagacgatgtattaaagattattaaggaacagtcccgagcaagagaggaaattgcaacaccacatatggtttcaactgggtatgaaattacacagcctttgaaagtgacagtcggtggtgcaacttgttttgttgttccagttgatgagtttaaacgcttctgatgattgatcttagtaatgttgggaaaaagcaaacccaatttttaaaaagagcatatgaccaaaaaaagttagctcatagttatctttttgttgatagcgatgaggcacgggcattgaatactgcatactggctagcttgtttgtttaattgtactggtgaaaataagccggatggcagctgtcaaaattgtcggcaaattttgtcaggtaaccacccagatgtattgctagtagcgcctgatggaaaacaggctctagggattgatcaaattcgtcccttaaaagaagaattagccaaaagcccagttgaaagtactcgccgtttcttctttattaatgaagcacaaaagttaactttagctgcagcaaacggtttattaaacttactagaagaaccagtagcgccagtagttacgattttgattactaacaatagtgatcagattttaccaacggtgcgttcacggacccagatcattaattttgacaatggtgagagggctagtggtaggactgcagtcttactggagaatggtttttcaaaagcagagattgaggaactgggtaatcttgataaatggaatcaggcaattaaatatttttatcaagaaatgctggaacacaacagcttagcacttgtcagtgcacataagctagctgctgatgctaagctagtgtcagagcagggttacatcttgcttcagttaaaattattggccgagcaagatttgcgtaatcctgctaaaagaataatggcggcgacaatgcttaagaatttaattgaaatagacaaaatgcgtttgagtaacgtaaatttacaaaatgcgttagattatctcgccttaaaatggaagtaggtgtttagattggatccatattcaaaactgaaaaagattgaagaaacaacagaaaatatgaccaagacgattgccagcttggaaaatgatattttagaaacattaaaagaaaacacggagttgaaggtagaaaatcaattactccatgagaagctggacaagttaacggcaaatcagcctgcacctgagactaaaacgcagagtggcttggaatcattgaagaagatttatgattcagggtaccacatttgcaatatgtactatggctcgcatcgtgatccaagtgcagattgtatgttttgtcttgatattttggacaattttggcgaaaaaaagggcaagaaaaaggacggtagataatgaaacgtcaaagcagttatgcaaaagatgaaggaaagctttatttagtgccaactccgattggtaacttggaagatattactattcgcgctaaaaaagttttaaccgatgcagattatgtagccgcagaagatacaagaactagtgggattttactggaaaaaattggggttcataataaaatgatctcttttcataagtataattccaaggagcgggcgccggaattgatcaagttgatgaaggaaggtgctgtgattgccgagattagtgacgcggggatgcccgtgatttctgacccaggttatgtattagtacaagaatgcattaagcatgatattccggttgtaccacttcctggtccaaatgctttttcaactgctttgattgcttccggttttaatcagccatttacttattatggctttttaccaagaaaatcatcggaacagaagacctattttgcacagatgcgcgataatagagcaacatcaattttttatgaagccccgcatcgtctagcaaaaaacctcaaaacattggctagtgtgctgccaaaagatcgtcaaattgtagctgcacgtgaactgaccaaaatccacgaagagtttatccggggtagtgtggaagaagttacgaattacttcaatgagaatgctccacgcggggaatttgtgattctagtttcacctaatacagaagcgcctcagcaactatcttggacagaattaattgacttagttaatgacttggttgaaaaaggtgaatccaagaaagatgcaattaaacaggtagccaagcagcatcatgtttctaagaatgaattgtatgatcaatatcaccaggattaattatgaagtataccgaagaatatcaaattgaatttaaagattgtgacgaaaatcggcgtttaaaattaccagcactagttgagttaatgatgcaggtttctgagcatcaattaagtcaaggtggtgctgggactgatgacttggttaagcgtggtctaggctgggtcgttactcaatatcattttgagattaaagacctgcctaaaccgggtgatcaagttattctaagtactgaagctagcggctataatcgtttttttgagtatcgtgattttggcgttagtacgcaagacggtaagccattagtgactgtaaaaagccagtgggtaatgctcgacttgaagaagcggcatatggtgccaaccgatactaaaatgatggaagattggggtgcaccactacttaaaaagatgccacgttttccaagattgcgtccgcaaaccgaatacgagcaaaagcgttcataccgtgcgcgttacgatgacttagatactaatcatcatgtaactaatagtcattatttcagttggtttgttgatatgttggatcgtaactttttaaaagaacatattgttacagcaattgatattaaatttgataaagaagttcattatggtgagagtataaattcttgcatggacttggttcaatatgatattattattacatctcatgcaattgaagcagaagatgggacagttaaggccgtctgtgaattaagttggcgtgagatatagtaacaacatgacgctattagttgtttttacttaagggaggaatcggtcaaatgaatacaaagaaaattttacgaacggatttacagcaactagtctttttaggtattgttgttgcaatgaaaattattctaagtcagttttcttttggtccagtaatggttaaagtgggactgggtttcattgggagtgtgctattaggatatctctttggtccgctctggggaacaattggcggtggaattagtgatttaatttcatctgcactttttggcgatcaaggtggctttttcattggttttactttaacagcaatggcaggcccatttatctacgccctgtttttatataataagccagttaaaatttggcggattattgcttctactattctggtgactgtaattgtcaatattggcatgaataccttatggctacatattatgtatggtatcaatttcaatgcggctttgatccaacgtttacctaaggagatgatcgttccttggattcaaatggttatcagctactttgttttacaagccgtttctcgtgttaaaataaaaaagtgatttaaagcgaaaagagaaaaatgtataaaatgaaaattttaagtgtttcgacagctactaatcatttgagcgtggccttgaatgatggtcaacaaattattgttgagaaaaatgaacgagatgagcgtaatcatagcgaacatcttgatccttggattgatgaaatcttaaaagataatgatttaagcttaaaagatattgatcgttttgcagttgctattgggccaggttcttatactggactaagaattggaatcactactgttaagatgtttgccagcattttagataaagaggttgtaggaatctcaactttacaagctttggctaaaggcgttcaagaagacgctttggtaattactggtttagatgcaagaaatgacaattattttgcggccggttatttaagcggtgctgtaccagagaatgtcattccagacggtcattacaatatcgacgttttaattaaggcgattcaagattatgcggccaagcatgaagttaagaaaattgtttttgtgggctcaggtcttgaaaagcaagatgaaaaatttaaagctttgaatattccatatgtttatggaactgaagaagagaatgtcatccatgctgggctaattggacaattagctgaaaatgcggttccagttgatccagataaattattgccacgttacttgcgtcgaactcaggctgaagtagactggcataaaaagacaggcaaaccattcgagccagatagtcattatgttgaagaagtttaatcaatttttccatcaacagttaaatcggattgatatgagttttaccccgtttattgcgaatgtaaacggtaagagactacaaattatgcaagctacagatgacaatattcctgacctgcctgtattagaggagcaagtttattcaggtcggacaccgtggaataagttttcatttgagcgagaactagagaagcggcataattgtctttatttggtagtgtattatgaatcgatgctagttgcatttattggtgcgcgttttactccagaagagacgcatattactaatattgcagtagcgccggcttttcaaaatatgcatattggtcgttacttaatgcaattgattattgatcgggcgcgtgaaaatgacagtgattgcgttagtctagaggtaagagtagataatgagattgcccaaaagctatatcgttccttaggttttgaaggtaccttcattcgtaaaaactattaccatgatactcataccgatgctatgaacatggttttatggttaaaaccacatcagattaaaagaaagaagtttacgttttgagtgaaaaaaaatgttcgcattttagcttatgagagttcttgtgatgaaacttccactgctgtcattaaaaatgggcgtgagattgaaagcttaatcgtagcaacgcagattaagagtcatcaacgctttggtggtgtagtccctgaagttgctagtcgtcatcatattgaagtggttagtcagattactaaagaagctttggctgaagctaattgtacttggaaagatatcgatgcaattgctgtgacttatggccctggcttagttggtgctcttttaattggtgtaagtgcagctaaggctgcttcaatggcaacgggtattcctttgattggtgttgatcatattatggggcacattatggcagctcaactaaaagatgagattgaatatccagctcttgcattacaggtttcaggtggacatactgaaatagttttacttaaggatcctgttcattttgaaattatcggtgatacgcgcgatgatgctgctggcgaagcatacgataagattggtcgtgttcttggggtaaactatccagcaggtaaaactatcgatgcctgggctcatgaaggcaaggatacctttaacttcccacgagcaatgatggaagatgatgactatgacttctcattctcaggtttaaagtcagcttttattaacacttgtcatcatgctgatcagattcatgaaaagttgaataagtatgatctggctgcaagttttcaagcagcagtaattgatgttttggctcataaaacaattcgcgcaattaagcaatataagcccaagacctttatcatgggtggtggggtagctgccaaccatggcttacgtgatcgcatgagtgcagaaattgctaagttgcctaaagcagaccaacctaaggtgattttgccagatattaagttgtgtggtgataatgctgcaatgattggggctgctgcgtataatctttataataatggtcaatttgcggatttgactttgaatgctgatccatcacttgaattgccatatgctaagagcatgttgaattaaatagaataactttttaaatcaaatacctagaacgattatttctaggtatttttttctactaaggcatggtccttaggatcttttaaatctaaggcgattgattcgtaagcgtcaaataaaatagtgtacttaaaaaccgtcccagttactgttatactgagacggttatttaagttcttttatttacaatttatctggatcttctcttgccacggtaaataagcttcaagggtttccgaatccagaatctcttcattcggtaatttctgaagcaaataattcaagtacttttcaggatcaaggccatttctcttggcagtttcaattaagcttagaataaagccacttgcagtagcaccctcaaaactttgagaaaataaccaattctttcggcccatgacgagtgattttacagcgcgttcagccttattgttagataattctaaattgccatcaagcaagacatgctcaaaagtagcttgatgcttgagggtataattaatggctcttcccaatttagagcctggcaaaacggtgattttatttttctcacaccagttgaagaactcttgcatcagaggcttgagctttgcttgtcttagctggtaacgttcttgtttgctcaaattctcccaggtttgttctaagtaaaacatgcgattgcagtagttgagtcctttttgggcaagggacttttcagaagcctgttgtggtacggcttcgtgaaactttcttctaacatgagcccagcagccaactaaagttgctttcggcaattgctcataagcctgccacatatcacagtgcaaataaccgggatagtttcctaaaaagtttaaggcaaccttgcaactccgggaaggatcatgatgatagagtgtaatcccgtattgatcatgtttgcctgaaaggaagacccaatagtaagtcttgattgttttactttctaagactgtataataagtttcatcggcatgtaaaattggccgcattaacagcttttgcttaagcagatcatacactggtttaaagtagtattgactgcttttcaaatcccaataatttaacatctgtcttgaaacttctagtcccatcttcttccagtcgctttcttgacgatagtccggcaccttcatttcatatttttgataaagtgaatgagcgatgagtgaagctgaacctagaccatggtttaggggagctttaggtactgcagctttaatgatcttgtcgctaagatttctttgactgcaatatttacatttgtaagcatgttggatatggtctaaccttttaagttgagctgggataaacaataattcttggcgaactgactgcttgcctatctcaatcagttcatgatgacaatcaggacaatgcttgtcgcctaattcatggtgaacctcttcagctggaagggcagctagtaagtcagcacgctttcgtttgtgagcttgtcttttataagtaatagtctgaacggcggcgtcggggacgttctccgtcatcttgagcatcaggttcatcaaagagacttgtttgtccatttaaaggcatttgttctgaagatttgccataacgtttttgcgttaagtaagctacttgttcacggaggagcttaatttcatcagttaagttttgaatagtagttgcttgttgtgcaataatcttttccaaattttcttgtgacatgagttaaacttcctcctaaatttattagttaaaagaatatcaaaaaagcgtgcgatgtcaagtgttagtagaattcgcacgctttcgtgttctttatttttggattgattgcgaagcccttcattagccagtcgacctgctcagaagataaagcttgaacttcattttgattcctgggccagttcaattttccattttcaaatcttttgtagagcagccaaaaaccttgtccgtcccaataaagggctttgaagcggtccttgcttccgccgcaaaagaggaagactttgccgctaaaaggatcaagttcaaactgttctttgactaaagttgctagtccatcaatgcctttacgcagatccgtcttgccgcaaacgatatagacttgccctaagtcactgagcttaatcatggcaagactttctcaagcagcttattcataatttcagggtctaagctgctgtaaaaattcagctctaagtcattcttctttaaactaagcaacagattattgcgtggtggacgagccttcttaggtttagaagaacggccaagtgccacaatgggttgttgttgttcgatcatattcttaacctccattaaattgatgagattagaatacctgaaaaatacggactaaaaaagatactcggttatatgacgcttacattgattccttgcctgcgttacagattctaaagtattcgctagaaccatctgcgatatatggccccatgtgacgcgtgtcatcgcctgtttttctttcgatatgaattacccgggcaccactatctgcgagcattctggtacaagtagggcctgagaggacgtgggtaaagtcaataacgagcatcccgcttaaaggataaggtttgtttttatctaaatgactgttttttgcttctagctcagcataattaggttctgtcatagttgtacgctttctattttaaaaagaaaaagctgttcgaagtgaacagctttttgatgagaataaattaattattcacccttgataacttcagtacgtggattcttaggaccttgagccttagaaattatgccttcttcagtcaatttttcgatttgatctggatcataaccaagtgaagctaaaatttccttgttgttttcaccaagatctggagcacgcttgtagttagaaagtgagaatggcaaaccaatagtcttgaacttaccacggttaccaccttggtcgatggttacgatagtaccatccttgttcaagtccgggccattttcaatttcgtgccagtcaagaactggacctacaggaatacaagcagcaccaagcttcttagttaattcatacttgtcgtattgcttagtgtagctttcaattaatgggtaaatttcttccttgtgtaattgacggttgtgccagccatcaaagcgaggattagtaatccattctgggtgacccatagtgttggcaattgctgcccagctcttgtcactgttttggataacgatgtaaacataagcgttaggattagtttcccaacctttagccttgtaagtccgaccgataacttggccaccttcagtgttctcagcacgaggaattgccttgccccatttccagttagggtaaacagcgtagtgaggaagggcacctaagttgtctaacatgatttggttacgcaacttgatacggcagaggttcaatacagcgtcttgcattgactggtaaacaaaagtaccttcactggtgtgttcacgttgaagaagggcagctaagataccaatagtaaggtgcatccctgggtttgagtcacctaaagtagcagctgattgagtaggaacgttggctttgccttcgttccaaccagtagcagaagcagcaccaccagcagattgagcaactggttcaaaggccttaacgttttcaaaacgtgaatcttcattgaagcccttcaatgatgcatagatcaatcttgggttcaaagcgtgaagcttttcccaaccaaaaccgttacgatcagctgaacctggtgcaatgttttcaacaaagacatcagccttcttagccaagtcgtacataatctttttaccttcatcagtcttgatgttcaaagtcaaagacttcttgttggcgttcaattgcaagtagtaaagactccatgaatcttgaatatcaagtaattcatttctagtagggtccccagtgttagtacgttcaatcttaataacttcagcaccaagccatgctaaaagttgagtacatgatggaccttattgaacttgtgtccagtcaacaactttaataccttttaaaggtgcatattcattttcttcagtcgtgattaattgtccttatcttcaagttgtgctaaatctaattctgggtttaagttaccaatgtgaccagattccttacccattgattcaggaatttgagcatcaataattgaaggattacctgattcgtaggccttttcaagagcatccttcatttcagcgtagttacttacacggtagctgtcaccaccaaaggccttagcgatttcagcatagtgagcattgtggcttaaaacagtaggtcctaattggtctttaactgggttacggtcaccattgtagataccaccattgttaatgatgacaacggtaacaggtaagtggtaacggcagatagtttccacttccattccatcaaaaccaaaggctgagtcaccatgaagtgagatgactttcttaccagtttcaacagctgcagcaatggcataacctaagccgacacccattacgccccaagtaccagtatcaagacggtgacgaggtttttgcatgccgattaagttacgaccgatgtccaaagtgttggcaccttcacttacgatgtaagtatctggatgcttttgcattaagtcattgattggttcaatcgcactgtaaaagcctaaagttggcttagcttctgaggcagcaattcttttggcaaatttttcattgttagcttcacaagcattcttaattgaatctagccagtcttgaggggccttaacgtcagctttttcaagggctgcgtttagtttttgcaaaacagaggtaatgtcaccttgtaatggggcatcgatctttctgtttgagtcaaattcagtagcgtcaatatcgacttgaacaaacttagcatcttcattaaacaatggagcctcaccatttgaaagcatccaattaagccgagcaccgattaataagactacatcggcttgacctaaagtaaatgaacgagctgaagcagctgatgatggtgagtcatctggtacaacgcctttagccattgacatcggcaaaaatggaataccagtcttagtaactaattctctgacttctgcttcacttctagcataagctgagcccttacctaggataatagcagggtgtttagcgttttttaataattcaacagcacgttcaattgcgtcatctaatggcaattgctttggagctggatcaactacttcatagatatgagcgtctgacttttgtgcaactgtgtcggcaactgttgcagcaggaaggtcaaggtaaccaccaccaggccgaccgctcatagcagttctaacggcacgagcaactgctaagcccatgtcttcagcacggtcaacacgataagctgctttacataaaggtttagcaacattgtattgatcaagtccttcatagtctccacggtcgaggtcgatgatatgacgatctgatgaacctgagatcataatcattgggaagcaattcttagtggcttctgctaaagcagttaaaccatttaagaaaccaggagcagaaactgttaaggctacaccaggcttgtcggtaagaaaaccagcagcagcggctgcgtctacagctgcatcttctcttctaaattcataaaacttcataccctttaattcagctaaacgggcaaagtcagtaactggaatgccgacaacaccatacatgttgtttaaaccgtttgcttgtaaagcatcgattaaaagtgcagcaccagtaagtgatacattttgtgtcacgaaaaaaattctttcaaaaaatcaccaaatgcttatgtttatgcatttcaaaaccaagatacacctcttgaattgtatatacaggcataattgaataataaggtacgttattttaatatacgtatataaaaataagcaagtcctaatatattagaacttgcttattatacttttattcaaaattgtccatttcttcgattgccttttcccaggcagaatttgcttcatctaatttctgttgtacatcagaaagctgttcttgcagtggccccaatttatcaaagcttgaagcaatttctggattggccatttcggtttggatttcttgctctcgttcttcaagctgttcaatttgtttttctgcattatcaattgcacgctgcaactttctcttttgagaatcacgttgcttttgctcttggtaagaaagtttttgctggctaatttgtttgcttggctcgacttctggctcagcggcactattttcagccatagctgcttgttttgccttctcatcaagataataagaataattgccatcgtagactttagcatgcccatcgcgaactaaaacaatcttattagctagttgattgataaagtaacggtcgtgggaaacaaagagcagggtaccatcaaagtcttttaaagctttttctagtacttcttttgcttcgatatctaagtggttagttggttcatccatcagtaagaagttatcatgctcaagtgataaaacagttaaagttaaccgtgctttttgtccaccagataattgacctaccgttttatcaatgtctttagctgtgaataaaaaactggctaagattgaccgtacatcgcgttcaggcatggttttgtgacgatcccaaacagtatccaatacagtcttagatgaatctagtccttgtaattcttggtcgtaataaccaatctcaagggatgcgccatacttaattgagccactcttgggcgttaattgcttcataatagtcttaagcagggtagatttaccgattccatttggtccaatgatcgcgacgcgatctcctttattaatctggaaggaaatatctttaaccatggttttatcgggataaccaatcgtcaaatcgttgaaaattaatacttccttgccagaaggatgatcgcttgaaaaatgaatccgtaccttatttttatgtttaggtggagtaatccgctcaattttttctagttttttacgccgactttgtgcacgcttagtggtagttgctcgaaccaagtttttttggataaattcttcatcttttttgatttcagcttgttgcttttcataagcggcttcttggtccttatcacgttgctcgcgctgcatgacataggctgaatagttgcccttaaaagcagttaatttaccaaattctagttcaaaaatttgggctgctaaatgatctaagaaatattggtcgtgggaaaccacgaggattgcaccactgtaattctttaaaaatccttccaaccaatctagggtatctaaatctaagtagttagttggctcgtccaataacaacagagcaggtttgcgcaaaagcaacttaacaaaagctaaccgtgttttttcaccaccggataaactaccaatcttcttttgccaagtgtcttcaggaaacttaaagccattcaagatacttttaatatcagattgataagtataaccgcctttttgttcaaagttgaattgcttttgatcgtattgcttaagcaattcttgatcttcaggatgatctgcaattttttcttgtagttggactaagctttttctttcccttattaaaggagcgaaaacggtttccatttcatcccaaatggttttattttcatctaatgcattttcctgagcgatataaccaacatcaatgcctttattaactgtaaattcgccgtgagttggttcttgctcacctgtcattatttttaacagggtagtcttaccaaccccgttaggaccaactaagccgattctggcattggaatcgattgaaaaattaacatttttgaataatgtgttggccccaaattgttgttctaaatcgtgtccttgtgcaataatcataatttttcacctaaccactattctaccatatagcgcaaattgtttgtttttaagttaaatatgtgaaaaaatgatgatttgtgaaaaagatacttgcataagtactatcatagcaggtatgatagtagtgcttgattgtacattcacaaacatttaagtttggagggttcctatatggaaaaaataaaaatcccaaaagcaacggcaaaaagattaccattatattaccgttatttgattattttaaatgaagaaggcaaagataaggtttcttcaactgagctgtcagaggcagttcaagtagatagtgcttcaattagaagagacttttcatattttggtgcgttgggaaaacgtggctatggatatgatgtaaagaatttattgagcttcttcaagaaaattttgaatcaagatactttaactaatgttgctttaataggtgtaggtaatctgggacgggcgctgcttaattacaactttaagcgcagtaataatattcgaatttcctgtgcttttgatatcaataaggagattactggtcgtatcttaagtggtgtccctgtttatgacatggacgacttaaagcaacaactaagtgatcaacagattacaattgcaattttgacagttccttcaacagctgctcagaaaaccacagatgaaatggttgatgcgggtgtaaagggaattatgaactttactccgattcgtttatcagctccagctgatgtgcgagtacaaaatgtagacttagcaaccgaattgcaaacgttgatctatttcttagatagtgacaaagaaaactaaatttgagtaaaagaaacatactaacctagtgttggatcatgaatcgacggattcacgatctggcactttttattttgtctaaaatagaaagtgaagataaagcaaatcaagtcttcagctttttagacacttgatgtcgtaaaagaaacggactgctttaccacctattcttaagtctcttcgaagtctgtgggcacttagatgccgtgtttagaaaattagaattaataggttgataaagaggtttatcttcacagcggaggttatattatggaatcacaaattattttcggtattgatgttagcagtaaatcttccacagtttgtgtggttaatgaccggatcaaacaaggcgaatcttttagaatctctaatgattcctttggctatcaaaaactttatgagcaactgaaccaatatttgataactcctttagttgttttcgaagctactggtgtttattctctaagcctgcaagctttcttagaggattatcatattaagtatttgaagcttaatccgcttaaagcgaaaaagctaatggacaataatttacgccataataaaactgataaggtagatgcttatcgcctggctttaattcaatttaatgccccgcaaaagctgcgtgatccacagcccagagagtatcatgaacttcagaatgccagtcgctattatgaagaacttactaggagtatagttactactaaaaatcaattgcaccgcaacctccaatccactttcccacaaattgaagaaatactgtctcatccatctggcagaatttattgggcgcttgttagtcttttcccacatgctggatatgttctagaaaagaatgagacacaggtaactcaaatgcttaattctatttctggaataggacaacaaagggcacggtacttaaccacaagattatacgcttttgctagagaagcttatccttatgattccaaagatagtattatcgttagagctattcaaaggaacatttctaatttattttcactccagcaagaacgcgactatgtaattaactacatggaaaagctggctaaagcagtaaacgctcgtgctttatccatctatttgagtatcccaggggttgctagaattacagcagtgagattagtagcagagctcggtgatctaagacggtttagcacttcagctcaaattgatgcgtttgttggcattgatccaggaaggtaccaatctggtgaaaaagacagttctcttggcattaccaagcatggcaatcatattgccagaaaaatactttatcgagttattactcaaatggagacggtaaaggctacgcagccttgccatataactgattattatgacaagaaaaaacgatcttcaaatagacaaggctataagaaaatcgccattgcatcagtccataaactgatacgcacaatgtttgctcttatcaaacatgatcaattatatgattacaacatagccaccgaaaataaaagactttagctgaaatcaaataatcaacttaagtataagcaacctatggaaaaactacaagtattcataggcttatttgtggtactttcgctttttcttaaatttaaactcttatttgctttaaccttattcgcatcattaaaacaagtaaatttattttcttaaatcattgataatacttgactttgggtagaaaaaagccgattttcggctttttttcatgcagttgtttcacttttgattaatttgacaggcaaaatataattcttttggcgcaatttttcgtcgggattggaaattcgggtaagcaataacttaaccaataaagttgcaatatcatgaattggctgagcaattgtggatagttccgaatggtaagtttgaatttgctttgttccgtcaaaaccaatcacttttaattccttaggcactttaatgcctaatttttttgcttcttgtaaaactaacactgcagttaaatcatctgtgcagacgacgccatcaggctgatcattgactaacatatcatgaattttcatatttttaatgttggaagaatcagaaaaagcaactgaacgaatgtgggctgaaaagtgacattcctttgcttcatcaagataagctgctagtcgttcgtcagtcggattaccttttctgtgttcattgcccagaaagtaaattttgtgacaaccagcttgaaccaagtcatgtactgccaacttgatgccttgataattatcacaactaacaattggaacattatcagatagctttcggtcgaaagagacaattggcaaacctagttgttggtattcattgatacctagattgtgcgcaccagcgatgatgccatcaacttgattagcctgaagcatgcgcagatattcgcgttctttttctttgttttgtcctgcattgcataggattactttatagttttgttggaataaagtggtttcgatatcctgtactaattccgcaaaaaaaggattagtgatctcaggaaaaatcaaaccgactaatttcattttctttccttgtaatgagcgggcaatagaattgggacgataatttaattcccgcattgcggcaaaaactttatctttagttttttgacttaaatagccatggttgttgattactcgcgaaacggtagttacagagcaaccggcttttttggcaacgtcgcttaattttgctgccatagtatcacctgatgtttaaagaattgtttgcatttgccaaagcttgccagtgtagtcaatgtcttgagcaaacgcaatttttttgttggtctgatcggcaaagtagcgtccagtcaataccttttcaccatcattaacgaatacttcaattaatgaatgatcaacaaagatatcaagcttgaggtcatgatttggtgaaagcgtaatagctcgactttcgccataatcaactgctactttttgcccagcatgagcacgatctaatactaatttaccatttttggtatcgaaattgagctgtaaactgttacttaagtcattatttgcagctaaatgtaaagtgccactttggttagccttaattgttaattcaagttcaaattgttggccggcttgatcgctgactacttgattagatatgcttgcttcgtttttgcggatactgcttattgccttaactggcgtttgaattaacttgtcactctttaggtggagttccttcacttgactcaagcagttagcccagttttcatcatcagtagggtaagtagtgtcaggcaagccaacccaactgacttcgtaggcattaccatctggggcgttaaaggcctgagtggcataaacatcgaacccgtgatccaaattgtgtaatttacctggattaattaacttatgattttcccagtcaatatcatcagcaataacgtacatatttgggtaaatgtcatcataagctgctacttttttgtctaaaccctgaggacagaaaatgaccacgactttgccatcaacacggacgatgttgggacactcgatcatgtagcccatgtcttcgttggtaaagtctaagaagcccaattcttcccagttctttagatcctgagacttccaaacgtcaatgtgaccgtgtttttcctttttatcttgggcacctaaaattgcgtagtaagtgtcattttctttgataatttggggatcgcgaaaatgttcggtgatgtgatctggattcttaaataggatggttttgtctgaaactttattatttttatccatccaagcaccgatttgataaggagtacgtacccaattttcatcgcggtggttaccggtatacatgatgaaaagcttaccatcgatttcgcgagcagagccagaataagctccatgtgaatcagccattgtgtctggttcaatacctaagcctaagttttcccagtgaaccatgtcagttgatttgaagtgccaccatgactttagaccgtgaactgcgccgaatggatatgattgatagaagaggtggtaagcaccatcaaagtaggaaaatccattagggtcattaattaagccagaaataggatgcaaatgatagcgcatttggtaaggggagtttgcggcttgtgcttgcaaatgcattaatgtatcagcgtcccaatcttgataaggtaagtaacgtttttctcttgtccattccataaatatacctccatgaaagcgttgtctttttacatgtattttaagttagtatgaaaaatatgtcaaacgtttaacagaaaaaataattattaattcataagtaataaaataaataaagaattttatgtcaaacgattgacatattttttgaatgcgttatcataattagtgaattgagaataaaacgtttacataggagggatcaatatggaccacagaaaagtggctgaacgagtaattaaagacgtcggccgtgacaatattattgccggtgcccactgtgctactcgtctgcgtttagtattaaaagatgattcaaaagtcgaccaaaaagcattggataatgatccagatgttaagggtacttttaaaaccaatggtcaatatcaagtaattattgggccaggagatgttaatgacgtttacgatgagttcattaaaatcactggtttgaaagaattatcaaccgatgatttgaagaaggttgctgcagaaggtaaaaagaagaatccagtaatggatttcattaaacttttgtctgacatctttgttccaatcattccagccttagttgctggtggtttgttgatggctttgaacaacttcttgacttcaccaggtctgtttggaccaaagtcagttgttcagatggtaccgaatgttgctggtatttcaagtatgattcaagttatgtcagcagctccgtttatttttatgccaattctagtcggaatgtcggcagctaaacggttcggtgctaaccaattcttgggtgctacaatcggaatgattatgacgacacctggactccttggtgcaaatcacttctgggacatttttggcttgcatgttgcgcaaactaactatcaataccaggttattccagttttagtagctgtttgggtattgtcaattttggaaaagtacttccacaagcacttgccatcagctgttgactttacctttacgccacttctttcaattatgattactggctttttgacttttacaattattgggccagtcttcaaaggcgtatcagatggtattaccaatgctatcgtttggctatatgacactactggtgcctttgggatgggtgtctttggtcttacctattcagctattgttactactgggcttcatcaaagttttccagcggttgaaactcagcttttagcagcctttgctaagaatccagccagctctggtgactttatctttgttaccgcatgtatggctaacgtagctcaaggtgccgcaactttcgctgtttacttcttaactaagaacaagaagatgaagggcttggctagttcatcaggtgtttcagcacttcttggtattactgaaccagcacttttcggtgttaacttgaagtataaattcccattcttctgtgccttaattggttcaggtgtagctgctgcttttgcgggcttgatgcatgttactgcagccgctcttggttcagctggtttcttaggcttcctttcaatttatcctaagactattccaatgtgggttgtttccgtattaattagttttgctgttgccttcatccttacttatgtttatggtaagggtcatttgaaggaagaagttgctgaacaagatgttccagtaaacgacgcaactgattatgctgaagaaactcaaaaggctgaaaagcttggtaaggaacaaatggcattaaaggatgaagttattgcttcaccagttgatggtactcctgagagtttaactaaagttaatgatcaagtattctctgctaagttaatgggtgatgatgcagccgttattccaagtgatggtacgatctattcaccagttactggtactgtgactattgcttatgaaactaagcatgcttatggcattaagtcagacgatggtgcagaagtattgattcacattggtcttgatactgtaaaccttaagggcgagcacttcgaaagtttcgttaagcaaggtcaaagagttaacaagggcgataagcttggtacagttgaccttgatgctgtgaaaaaggcaggctatgatactactgtcatggtagtaattactaacactgccaactatgcaaatgtttcaagaattactgatgcgggtgacaagcacggcgacaagttgattgctgttactgcacacaattagtttcttctactcctctagaaaaaattaaaacaattagaataaaagacgctaagaaagattgtttcttggcgttttttagtactaagtgttgcacttcaattttaagtttgagtaaaatgttctctataaagaaaaacaaagtgagggtatgttttatgaagttaaaaagtggagttattggagtattagtaactggattaactgtctttagcattaatctaactagctctaaaataaaggcagcgataacagtgcctaatcctaagacagattatgtagttaaaactacttctaatgtgtataagagtaatggtaagaggaccagttttaagacacgtggtcagatacaaaccggtaatgttccagtaattgaatcacaactatatgaaggcaagttcattaatgtgcaaggaactaagacgattaatggtactgcttattataagatcggtcctaacgcatacattaaacaaaataatgttttaaattatgctcaagaaaaagcaaagcttgaggcatatcaggcacaagatgatgtgaatgatgattcagatcagtcaacagaattaagctctgatgatgtgaattttgacatagcttggtatgacaacattaatgaggatccatctccagcgatgttcgatgattcaggatatcataatagagtgattaagaatgctcgtaaattattaggctatttcacttatggaacaggtgcataccgaactaattttggcagttggcgtcatcctaataaaaacggttcaactgattgttcaggatttgtgtggatcgtaatgaagagagcaggatatcgtgtaggaaatgctccattttttactctgccaatggaacgagatgctaaaagtactcatggctatttgaagaaaatttctgccaagaatattcgcccaggtgatattgtgattgttaatactggcaatggtgttggtcaaaacggacatgcagcaattgttgatggcaaatatgatggttgggacacgcaaattattgaagagggcggcaacttaggtgtagatgatgtgcaccgctctagtttaggtagctcactgagcgataagctggccaaaggtcgaatcacttatgctcgccccgttaaatagtatgctctatgctataattttgctaatcaataaaggataataagaatgaaaaagaacagcacgcttaaacatgtctggattatgacggctgtctattgggtagtaggtattctaagtattttctggggtaagcttgatcatacttttgcgtctcaattaaaagagatcaataatatttacgtgttagttttaataattatcttaagcttgccgctacttttatcgctgttattgtcggttaaagtaaaaatgccacgtttgatctgcaatccactagttgctgtaatttatctattagtggtaattgcagcaggtgtagcatataacttacaaaatattattggctacttcttcccaatcatcctcttcattattatggcgctagttgctgttttctatgctttggttaagacttttagcagcagaaaaagtggtaaatatttttttattgatggtaaagataagaaagaatgccatgatttctgggatgcttataagaagtactatgtaatgggattaacttacggcattattgatggtttgattactgtaattagttaaaaaagttaagaaaaatcaaaattagcactcaattgaaaaaagtgctaattttttcttgctttttttcacaaaacagtttattatcatatttgtaagttagcacttagcaaataagagtgctaatgattaatacagtaataaaaaatataatgaagaaaattaaacataagggggactaaacgtgttacaaccaattggtgatcgcgtgatcgttaaagttaagaaagaagaagaagaaactgttggtggcatcgttttagcatcaaatgctaagaagaagccaactgaaggcgaagttgtagctgttggtgaaggtgcttacgcatcaaacggtgaaaagattccaatggctgttaagaagggtgacgtagttctttacgataaatactcaggcactgacgttgaatacgaaggtgaaaagtacttagtccttcacgaaaaagacattttagctattgctaagtaatttagttaaaatttccaacgataattaagtaaattaaggagcatagataatctatggcaaaagatattaaattctcagaaaatgcaagacgttctcttttaaagggtgttaataagttagctgatactgttaagactactattggtcctaagggtagaaacgttgttttggaacaaagttacggcaaccctgacatcactaacgatggtgttaccattgcaaagtccatcgagttaaaggatcactacgaaaacatgggtgctaaacttgttgctgaagctgctcaaaagactaatgatattgctggtgacggtactactaccgcaactgttttgactcaagcaattactaatgaaggtatgaagaacgtaactgctggtgctaacccagttggcattcgtcgtggtattgaaaaagctactgaagctgctgttaatgaattgcacaagattagccacaaggttgaatcaagagaccaaattgctaacgtagctgcagtttcatcatcttcaaaggaagttggtaacttaatcgctgacgctatggaaaaggttggtcacgatggcgttatcactattgaagattcacgtggtatcaacactgaactttcagtagttgaaggtatgcaatttgatcgtggttacttatcacaatacatggtaactgacaacgataagatggaagcagatcttgataatccttacattttgatcactgacaagaagatctcaaacattcaagatatcttgccacttcttcaagaaattgttcaacaaggtaagtcattattgatcattgctgatgacgttactggtgaagctcttccaacacttgtattgaacaagattcgtggtaccttcaacgttgtagctgttaaggctcctggctttggtgaccgtcgtaaggctcagttacaagatattgctgctttgactggtggtactgtgattactgatgacttaggtcttgaattaaaggacactaagattgatcaattaggtcaagctcgtcgtgtaactgtaaccaaggactcaactactattgttgacggtgctggttcaaaggatgctattcaagaacgtgaagattcaatcagaaagcaaattgaagaatcaacttcagactttgacaagaagaagcttcaagaacgtcttgctaagttaactggtggtgtagctgttatccacgtaggtgctgctactgaaaccgaattgaaggaacgtcgttacagaattgaagacgctttgaactcaactcgtgccgctgttgatgaaggttacgttgctggtggtggtactgctttagtagacgttgagaaggctatcaatgatcttaaggctgatactgcagatgaaaatactggtatccaaatcgtattaagagctttgtcagcaccagttcgtcaaattgctgaaaacgcaggtaagaatggtgaagttgttttgaaccacttactcaagcaagaaaacgaaattggctacaatgctgctactgatacttgggaaaacatggtagatgctggtatcattgacccaaccaaggtaaccagaaccgctttgcaaaatgctgcttcaattgccgctcttctgcttactactgaagctgttgttgcagaaattcctgaagaaaagccagctaacccagctccacaagctggtgcaccaggaatgggtatgtaattatatatcttaatgctttagcatttagatatataattcttgattacgaagtaatcaagttcatttacagtgctttagcactaaacttatgcacaaactctcactctagttcaaaaacaaatataattaaaatgacttcgaagttaaacaatcagttcagcttcgaagtttttctttttgtagcgtataatattgtacgtaactctatctaaaatacgaaataggaaagagacataaatgacggaaaaaacaactccaatgatggagcaatattacgaaattaaaaaacaatatcctgatgcctttcttttttatcgcgtcggagacttttacgaactgtttgaagatgacgcagttaaaggtgcacagattcttgaattgactttaacgcaccgatcaaatagaactaagaatccaattccaatggcaggtgtgcctcatatggctgtggatacttatgtaaatactttagttgaaaagggttataaagtagcactttgtgaacaacttgaggatcctaaaaaggccaaaggcatggttaaacggggaattattcaattagtgacgccgggaaccatgatgaatgaaggcccaaatgatgctaaagattcaaattacttaacatcagtaattaccactaagagtggctttggtttagcctacagtgatttatccactggtgaaatttatgctactcatttaaagagtttcgatgctgtttccaatgagctcttgtcacttcgtactcgtgaagttgtgtataacgggtcattatctgaacaaaataaagactttatgcacaaggccaacattacgatttctcgacctactccaattgaaggtgaacatgctgaaatttcttatgttgaacagaatttgactaatggggctgaaaaagaggctacccgtcagttagttggctatttgctttcaactcaaaggagaagtttagcgcacttgcagattgccaaaagctatgaagtaaatcaatatttgcagatgtcacatactgtgcagaataatttggaattggttgcttctgccaaaactggcaaaaaaatgggttcacttttctgggttttggataaaacacacactgccatgggtggacgcttgcttaagcagtggctagctcgtccattattaaacatggatgaaattaaccatcgtgaagaaatggtgcaggccttgcttgatggctactttacacgagaaaatgcagttgatgccttaaagggtgtttacgacttggaacgtttaactggtcgaattgcttttggtaacgttaatgcgcgcgaattactacaattatcacgttctttgcaggccgttccagttattttagatgctttagagcaatcagattcagatatcttggtcgattttgctaaaaaaattgatccattaaagggcgttgccgaaatgattacttccactatcgtgaaggatccacctgtgttgactactgaaggtggcctgattcaaggtggggttgatccgcagcttgatcgctatcgggatgccatgaacaatggaaaaaaatggttggctgaaatggaagcagatgagcggcaaaagacaggtattgataacttaaaggtcggttataacaaggtctttggctattatattcaggtttctaacggtaacaagtctaaggtgccacttgatcgttatacgcgtaaacaaactttgactaacgctgagcgttatatcacaccggaactcaaggaacatgagaatctaattcttgaggcacagacacggtcaactgacttggaatatgatttatttgttaagctgcgtgaggacgttaagaagtatatccctgctttacaaaaattaggtgggcaactagcagcgctggatgtttattgtggttttgctacagtagctgaacaaaataattattgccggccaacttttcacgcagataatcaagatattaatgtgactaacggccgtcatccagttgtggaaaaagtaatgacggctggttcatatattcctaacgatgtcaaaatggatgaaggaaccaacatttatttaattacaggtcctaacatgtctggtaagagtacctatatgagacaaatggctttgattgcgatcatggctcaagtaggttcctttgtgccagctgatagtgctgatttgccaatttttgatcaaatttttacaagaatcggagcagctgatgacttaatttcaggtcaaagtacctttatggtagagatgagtgaagctaatgaagccttgcagtatgctactaagcgcagtttggttctctttgacgaaattggtcgtggtacggctacttacgatggaatggctttagctggtgcaattgttaagtacttacacgacaaagttggtgctaaggcattatttgctacgcactatcatgaattgacagtgatggatgagactctggatcatctgaaaaatattcacgttggtgctaccgaagaaaatggcaagttaatcttcttgcataaaatcctacctggacctgctgatcaaagttacggaattcatgtagctcaattagcaggtttgccgcgcaacgttttgcgagaggcaactaaattattaaagcggcttgaagcacaaggcagtgaactagcaccagtttcgcagcaattagatttatttgcagagcctgtggaaaacagtgttgaagaaactgaaacacaaaatgacaagcccgcaataactgatgcacaacaagatatacttgatgatatttctaatctttatttagcagataagacaccgttgcaggttatgcaaatggtagctgattggcaaaaagatttaaaggatgacgattaatgagcaaaattcatgagttatcggaaactttaactaatcagattgcagccggagaagtaattgagcgcccagctagcgtagttaaagaattagtagaaaactcgttagatgctggtgctactcgaattcgcgttgattttgtagatgctggtttgaaacagattgtagttcaagacaatgggacggggattgcacgtgatcaagttgatctagcctttacccgacatgcgacaagcaagattgccaatgaacacgatttatttaaagtttccactttaggcttccgcggagaagcattagcttcgatttctgctgttagccatgtggaaattctgactgcaactgaaaacgcaattggtattcgagctaactatagtggaggcaataaaaaaggccaagaagatgcagcggctcgtaagggaacaaaaattacagtcaaggatttgttctttaacacgccagccagattaaagtatttgcgtagttcaagaactgaaattatgaagattgtggatattattaatcgacttgcgttaggttatccacatgtgtcttttactttgtcaaatactggcaaaattttattaagaacgccaggaaataataatttaaagcaaacagttgctaacgtgtatggccgtcatatcgcagaaaaaatggaaaaatttgaggcaaaagacagcgattttaagattacaggtctgatgtctaaaccggaattaacacgttctacacgcaattttatttcgattctcttaaacggccgctatattaaaaattttcaattaaatactgcgattctggatggctatggctcaaaattagcagcgcggcattatccgattattgtgttagcaattaaagtagatcctttgttagtggatgttaacgtgcatcccactaaacaggaagttcgtttatccaaggaaaaagaactgggtcgtttaatcaccagtgcaattagtaatacacttgtggaaaaagttggacaaattagcgcttttgctaatttggaaaataaacgtgatacgctagttgatcagcttagttttaacttaaatcaagatgttgtaaatacagctcgtaaaaaagaaccggaaattcgcgaacaagaaaagccaaaatttttaacgattgaatctgatgattcagaagataatattcaaaatgaggcggtaaagcaggatagtgaaaagaaatatgttgatcttaatcagccacgtgaagatgatcaatatatcgttactaagacctggaaacaaaatgttgctctgcagcaagcactaacgccatttcctacaactaggactaatcaggaagtcatttcaagtggggatgaaactttagctaataatctgcctcgcttggtttatgttggacagaccgatacttatttatttgcccaacataatggcgacctatttttaattgatcaggttgctgctagacgaaggttaaaatttgagcaaatttttcacatgataactgccaaaaaagtagtacaacaaggtttgttaacaccaattattttagaatttggtaatcttgattttatgcaaattaaggatcaagtagaacagattaagcaggttggaatctatttggaagattttggacaaaatagttttattgttcgttcgtatccaacttggattcacgataatgtcgaagattcaattcggaagattttagatggttatttgaatgtggataaaggaaaggcaaagaacctgtttagccggatagcagcaatgcaagctaagcgagaaattactggcaagattaaattatctgcagctgaagctgagcaaattttacttgatttacgcaagtgtactgatccatatcatgatgcagatggacggataattttggttagaatgagccaaaatgaattgagaaaaatgtttaagaaggatacgcgtggtgctagttaaatcgttctagacaataagccaaattataagctaaaattgcaatttccaaccggctttgaaagcctatcagactacgtgctcgattgttctcggcattgtaataggtcagaagcgaaaagtcgctttcaattgttctgcgaatagccatcaattgatgatcattgtgctttttagctcctgtcatatttttacgatatggtgtccaaagttcgtaacccatttgttttagctgttgatgcagttctttgcctaaatagccttcgtcgccaagaagatagtaattagatggatgggtattttctatcagttcaactgtctccctggcatcatgaactgatgcctttgttacgacataatcaagaatgtaaccgtcatcgctaacaatggcatgaactttgaaaccatagaagtaaattttcttggtggccttataaccaatgttggcataaccgcgaaaaattttagcacgatagtttcgaattggttggcaaacaggtaccggaaagctgtcaatgatcaagaactgtccattcaggtcaacctttttattcatttcttgccgtatctgataaatcaattgcaatagctgacgtgaacgccgattaaaacgtgagtgtgataaacaattgaaacattcacagaatcttctttgtgattcaattcctgtcttagcttgccagataagtaaagccaaaatcagactgtccgtagttttaatttgatcaatatttcgccgatgagtaaactcagccggtgcatacaaacgataccagtgccgacaaattatcactaaatctttaaaactaacttgtaaatggtggccaaaacgcttaagcttaaggcagttcaatcagatcagactcttttctattattactatttacaagtcgagtctaacaagattggacttttttattaactaaaacgatttaactagcaccacgcgtaagaaggatgaataatgtacgaatattttgaaggtgtgattactgtggttacaccaagctatgttgtagttgatgtcgggggcgttggctacaaggtctatagtcctacaccttttgcctatactcaaggccaaaaagctaaggtctttattgagcaagtggtgcgtgatactggcattactttatatggttttcaaagtcaagatgataagggcttgttcttaaaactacttagtgttagcgggattggtcctaagagtgcaatggcaatcatggcagctgaggatagtaattctttggcggaagcgattgaacaaggtgaagttaagtacctaactcgttttccaggtgtgggtaaaaagacggcttcacaaattgtgcttgatttgaagggtaaattaggtgattatgttgctcggcttgatcgtccagacaatggtgagaatgtgccgccagcattaaatgatgcactgcttgctttaattgctttgggttatacccaaaaagaagtggatcggatcacgcctaaactggagaaagttgctgcaaatactgcagatcaatatattaaaaagggcttagcattactgcttaaaaagtagatcttggtataatagaacagatgattattttttaaggaagtgaaactggtggcagaagatcaagtaacttcaggtgatattgagaatcctgaagaacaacaaatggaactttctttgcggccgcaaacgctcgaccagtacttaggtcaaaagcgggtcaaaaaagaaatgagcatttatattaaggcggcgcgccaacgtgatgaagcattagatcacgttttgctttatggaccaccggggttaggaaagacaactttggctttcgtaattgccaatgaattgggagttcatttaaagagtacaagtggtccggccattgaaaaggcaggcgacttggtggcacttttgtccgacttagatcctggggatgttttgttcattgatgaaattcaccgtttagctaaaccagtagaagaagtactctactctgcaatggaagactactatatcgatattgtgattggcgaggggcagactactcatgcagttcacgtgccgctgccaccatttactctaattggggcaacgactttggctgggcaattgtcagcacctttgcgtgatcgctttggcatcgtagagcacatgcagtattacactatcgatgagctagaacaaattgttttgcgttcaagtgatgtttttcacacttcaattgcgcctgaggcggcccatgaattggcacgacgctcgcgtggtacacctcgtgttgccaatcgcttacttaagcgggtgcgtgattttgcggaagttaagggagaaaaaacaatttcgctcgagactactgaaggcgcgttaaaacaattgcaggttgacgatgagggacttgatcagacagaccgcagattattgagaacgatgatcgaaggatataatggtggtcctgttggtattcggactttggcagctaatgttggtgaagatatggaaacgattgagtcactatatgagccatatttgttgcagcatggttttattttactcacgccgcgtggcagaatggtgacggataaagcatatttacagttaggattaccaattccaggtgataaatagtcccattttctgtataatggttataatatctagaaaataattttaatgaggtggaaattttgaacattttatttttagcaaatgccggtgctgcagcaagtagcaactggatgatgatcggtttatttattattttgatcgctttcacttactttggtatgattcgtcctcaaaagaagcaacaacaacaaagaatgcaaatgatggacaaattgaagaagggtgacgaagtcatcttagttgatggtttgcatggtaaggttgacaagatcaacagtgataagactatcgtggttgatgcagatggcatttacttaacttttgaaagaatggctgtccgtcgtgtgattccagttgctgcaccagcaactcctgcagctgaaactaaggctgaagctccagcagaaaagccgaaagaaaaagcagacgaaactaaaaaagaggataagtaatcatattacttaagagcgtcattttaggcgctttttgttttgctaaaaaaatccttgttgtaaaatagaagtgataattttagttcaaagaaagggatctgaaatgaagaatattcccgttgtaatgattctttttggtggtagtggtgatttggctcaccgcaagctttatccagctttgtttaatttgtatgaacaaggcttaattcacgacaactttgcagtaattggaactgctcgtcgtccttggtcacatgagtatttgcgtgagcaggttagtgatgctattcatgaaacgcacgatactgttgatgaaaatgagttgaaagcttttgcaagtcatttttattatcaatcacatgatgtaactaatgtggaacactatgagattttgaaaaacttggcacaagagctcgatgatcgttatagtgcacaaggcaatcgtctcttctacatggctatggcaccaagattctttggcacaatagcaacgcatattaatgaccaagacttgactggtagtggctttaatcgaattgtagttgaaaagccatttggtcatgatttggcttcagcagaggaattaaataagcaaatcacggcttcatttgatgaaaatgatatttttagaattgaccactatttaggtaaagaaatggttcaaaatatcatgccaatgcgttttactaacccaatggttcaaaatatttggtgcagcaagtatattaagaatatccaagttaccttggcagaacgtcttggcgtggaagcacgtggaggttactatgatacttcaggtgctttgcgtgatatggtacaaaaccatatttttcaaattattactctgctagcaatgccagaacctaaggatctttcttctgctagtgttcaccaagccaagcaagatttgcttaagagtttaattattcctacgccagatgatgtcaagaaatactttgttcgtggtcaatatttgggtagtgatactacttttgcttataagcaagagccaaatgttgatccagagtcaactactgaaaccttcgttgcaggtaaagttaagtttaatgagggaccaattgctggcgtaccaatttactttagaacgggtaaggaatttaaagaaaagaagaaccggattgacattgttttaaagcatattaataatccatatgggcaagctcattctaacaatattacgatcgtgattgacccaactagtgaaatttactttactattaatggcaaacgaattgcccaaccaggaattcgccgtgaaaacttaacttatgaattttcaaaagccgaaatggctaaggtacctgatggttatgaaagattgcttcatgatgtttttgtcaatgattcaactaactttacgcactggagcgaattgaagcgttattgggaatttatcgatgcagttgaagatgcttggcagaaggaaaatgaagcaggcaatccagccattgcacaatatttgccatacagaatggggccaaaggaagctaatacaatctttgagtcaccaactgaacattggatttatgaataaagaaaatttattaccgcaaaatgacatccatcgtcggattattcatctggacatggatgctttttatgcttcggttgaaatgcgggagcatcccgaatggaaaaataaggcattgattgttgggcaagatccacgacaaaatggtggacatggagtagtggctacttgcaattatgtagctcgtaagtatggcgttcattcagctatggccgcaattcaagcagtacgtttggttcccaaggagctaatagtttttactagaccacgatttgataaatatcgtgcagtgtcagctaaaatccattcttttatgcatgatgtgacagatcaggttgaatcagtggctttagatgaagcttatctagacgtgacacatccaaagatagagcaggagtctgcagttcaaattgctttagatttacagaaaaggattcggcaagaagtaggcttaaactcgtcttttggcgtttcctataataagtttttagctaaaatgggatcagaatacgccaaaccgtttggtcgaaccgtaattttgcctagtgaagtgcagaactttttagcaatgcaaaagattgagaagtttcctggtattggaccgaagacgcaagaagagctgcatcagatgggtgtttatactggggcagatttacaaaaaattgaggttttaaccttaattaaaaaatttaagaaaatggggtatattttagcccaacatgcacgtggaatagatttaagacctgttgttacagactcagaggctaatcgaaaatcaattggcatggagcggacttacgagcctgcaatttatactgaggatgaagccctaaccaatattcgtaactattgcaatcatttggaagcagcattaaaaaaacgcaattttaaggcaggtactgttgttattaaagtaagaaataataattttgatacggtaaccaagagaaaaaagttgaaaacaccttctgatagtcacttagatttttatgatgtggctcgtgacttgttcgaagcaacaagttcctttttagatgatggaattcgtttattgggagtcactgtaactgactttgaaaagaaaaaatatcaatcaatcagtttgttcgactaataaataaagctatttttctggtaaactagatacagatatttttacaagatgaggagattaaaaatgagtagttttgatgacatttatgaaaaaatcttacaatatcctacaattatcttgcaccgccacactagtcctgatccagacgcaattggttcacaagctggtttagctagagcattaatggaaaaattcccggacaagcgcatactttgtgctggggaaaacgatgaaggcgacttagcttggattaaccacatggatcaagtcaaggcaactgattacgaaggtgctttggtaattactactgataccgctaatacaccaagaatttctaataagttgtatgataagggtgactttttaattaagattgaccaccacccagatgttgatccatatgctgatatgagttacgtagatccagatgctccagcagcatgccaaatcattgtagacttcttgaatgaagagggctttaagattaccaaggaagttgcttacccactttatgctggaattgtaggcgataccggtcgtttcatgtatccagaaacttcagagcatacttttaaggtggctgctcaattagcttctactggaattaacattactgaaatcgctcgtaatattgctgatgtaacttttgatgaggcaaaattgcaagccttggcaatggacaagatggaaattgatcccgttggtgcagcttttacaattttgatgcagtcagacttgaagaagttaggtttgactgatgatcaagcaaatgttgctgtatctactccaggacgtattaaagatgtgcttgcttggaatgtttttgttgaaaaaacagatggtactttccgcgtacattaccgttcaaagggccctgtaatcaatgaattagctgctaagcatgatggtggtggtcatgcattagctagtggtgctaacgctaaggatatggacgaagtaaagcaggtatttgcggaagtcgttgaagtaactaagaagtttaaagaagatcatgaataatatttttatagattcaagaattaaaccagctattcaggctggtttaaagaagatccattttgaaaagccaactaaggtgcaggagaaagttattcctgctatgttgtctgacttgagtgtagtagtgcaagcagcaactggttcaggaaaaacgcatgcttatttagtaccaatttttaatgaaattgaagaagataaacgctatgttcaagcaatcgttactttgcctagtcgtgaattagccgatcagctttatcaagtagcacggcagctccgtgatgcggcagggatgcatttttcaattgcacatcttgcgggcggaactgatcgtgaacgtcaattagaaaagtatcaaaataatactccacaattggtgattgcaactccaggacgtttgttagactttgttcaaaagaaggtttttgcagttgatcaagtaaaaacttttgttatcgacgaagctgacatgaccttggacatgggctttttgaacgacattgatcaagttgctgctaaattgccgaaggatgtccaaattgctgccttttcagcaactattccagttaaattgtctaactttttacgcaaatatatggctcatcctgatgagatcgttattgataatcctagtgttattgcgccaacgattaaaaacgatttgcttgatattggctcaaaggatcgcaagaatgtcttgtacaaattgttaactatgggacaaccatatttggcgttggtttttgctaacactaagcaaaaggtcgatgagttgactaattatttgcaagatcagggtttgaaggtagctaaaattcacggtggggtaactgaacgtgaaagaaagcgcactctgcgtcaggttgagcaaggacagtatcaatatgtggtagctagtgacctagctgctcgtggcttagatattgatggtgttagtctggttgtcaattatgaaataccacgtgatattgagttcgtgattcaccggattggccggacggggcgtaatggcttatctggtcatgcgataactttaattcgtgaagaagaaatgaaccgaattgaagaattggaaaagatgggtgttcattttgacttcgttgaaattaaaaatggtgaattagtgccacgtaaacactatcgcagtcgtgaaaatcgtcaaagcaagaatcgtaagcttgataccaagctggtgggttacgttaaaaaagagaagagaaagcgtaagccaggttacaagaagaagattaagcgtgcgattcaagaggataatcgtcaaaaacgtaagttggaacagcgtcatgaggttcgtaaggcaaaacgtttgagaaagcgcaagcgtgaacaagggctttgacagaagcggattttgtagtacaattatttcagcttaagatatgttttttgatcaattatttcaaagagagagccagttagatgagaatggcttaataatagtcaaaaaatgctcctttaagtttcataattaagaatatcaagaggtaacaaacactgttgcaatcaaggtggtaccgcgcgtggagcgtccttgaagaaagcaatagtgttttttatttatttttagggagatttattttaatgaagaaactaaatagttcagagtttcgccaaatgtttttagacttcttcaaggatcatggtcacatgattatgccaagtgcatcattaatcccacaagatgacccaactcttctttggattaactcaggtgttgctaccatgaagaagtactttgatggctcagttgtaccaaagaatcacagaattacttcatctcaaaagtcaatcagaaccaacgatattgaaaatgttggtaagactgcacgtcaccaaactttctttgaaatgcttggtaacttctcagttggtgactactttagagatgaagctattccttgggcatgggaattcttaactagtcctgattggcttggcttgccaaaggaaaagctttactgtactgtttatccaaaagatgaagactcatttaatgtttgggtaaaggcagggatgccagctgatcatattgttaagttggaagataacttctgggatattggtgaaggtccatgtggtcctgatactgaaatcttctacgaccgtggtcaagaaaacaacgacgttgctgaagacgatccagaaaacttccctggtggtgaaaatgcacgttaccttgaaatttggaacatcgtattttcacaatacaaccacttgccaaatggtaagtatgttgatcaaccacacaagaacatcgatactggtatgggtcttgaacgtgtactttcaattttgcaagatgcaccaactaacttcgaaactgacttgttcttgccaatcattcatactactgaagaaatgactccaggtaagaagtacggtgaaaacaaagaagacactactgcatttaagattattgccgatcacgttcgtgccataagctttgctattgctgacggtgctcttccatcaaactcaggtcgtggttacgttttacgtcgtttgatccgtcgtgctgacttgaacggtcaacgtttgggcatcaagggtgctttcctttacaagcttgttccagttgtaggtaagattatggaaagtcactacccagaagtaatggaccaacgtggctttatcgaaaacgtaatccaaaacgaagaagaaagattccaatcaactcttgatactggtttgactttgcttgatgacttgattgacaaggctaagaagtcaaaggacaagactatctcaggtaaagatgccttcaagatgttcgatacttacggcttcccatatgaattgacttttgaatcagcacaagatgctggccttaaggttgacaagaagggctttgacgcagaaatggctgctcaaaaagagcgtgcacgtaaagctcgtggtgaccttcaatcaatgggacgtcaagatgtaactttaatgaacattaaggataagtcagtctttgaacgtgatacttacgaagaaccacatgcaaagctagttgacattgttgttgatgataagttggttgataaggccgatggcgaacatgctactttagtctttgacaagactccattttacgcagaacgtggtggtcaagttgctgatcatggtaagatttataaccaaaatggcgaattagtagctgaagttactgacgtccaacacgcacctaacgaccaaaacttacactttgttgaccttattttgccagttgaaaagggtcaagaatacgtattgaagttagataaggaacgtcgtgaagggttacgtcactctcactcagcaactcaccttcttcacgctgctcttcgtcaagtcttaggtgaacacactcaccaagctggttcattagttgatcctgactacttaagatttgactttactgcaatggaaccaatgaccaagcgtgagcttaagaccgttgaagaattggttaaccaaaagatttgggaagctattcaagttaagactactatcactacccctgaagagggtgaaaagatgggtgctttagccctctttgatagcaagtatggtgataaggttcgtgttgttcaaatgggtgacttctcaagtgaattctgtggtggtactcacgtggacaatactaaccaaattggaatcttcaagattacttcagaatcagctgtcggtgctggtatgcgtagaattgaagctgtaacttctaagaaggcttatgaatacttggcaaaccgttcagacttacttgatgatattcaagaagaagttaaggcaaccaagccagataacattgtcgataagattgattcacttgaaagtgatttgcacgatgctcaaaagcaagttgaaactttgaacaagaagatcaatgctgctaaggctggtcaaatctttaatgacgttaaacaagctggtgacttgactgtcattgctgctactgcagatgttaacgggatgaatgacttgcgtgaacttgctgataactggaagagcggcaacaagtctgatgttttagttttagctgctgaaaatgctggcaaggctaatatgattattgccttaggccaaaaggcattagacaagggccttaaagcaggtaacttaatcaagatcgctgccccaatctttggaggtggcggtggcggccgtccaaacatggctcaagccggtggtaagaatccagcaggcttgaatgatgctattaaggcagttattgacgaaatttctaagaactaagaattaattaattgtgtttaagctttttttcaagtaaaattgttgacaggaggaataaatatgagttcgctagataagactatgcattttgactttaatcagaacaaaggaaaaaatgtttatgatactctgcaagatgtttacaatgcgcttgaagaaaagggctataatcctattaaccagattgtaggttacttactttctggcgatcctgcttatattccacggcataacgatgcccgtaatttgattcttaagcacgaacgtgacgagattattgaagaacttgttaagagttatcttggtaagaataaataatgcgtttattaggtttagatgtaggttctaaaactgtgggagtagcaattagcgatgagctaggaattactgcccagaagttggagactatccagattgatgaaagcagatataactttggtatgcgtccattgaagaagctagtcagacaatatgaagttgacggtttcgtattaggtttacctaagaatatggatggtacttctggtagttccgtagctagaagtaaggcatacggcaaacgactagaggaaaagtttggtttacctgtacattattctgatgagagattgacaacaattgaatcacgacgagtacttgttgaggatgcagggatccatgatcgcaagaagcgtaaacaagtaattgatcagatggcagcggtgctcatcttgcaaaattatttagatttacaccgaaaggattaaaatggcagcacaagttaatggtgacgatcaagatcgtcaaattactttgattgatgatcaaggtaatgaagaattgtatgagatattatttacttttcattcagatgattatgacaaatcttacgtgcttctttatccagccgctgttggcgatgatgaagatattgaggtgcaagctttcagttatgatgccgatgatgccggcgatgtaacaagtagcgatttgcatgagattgaatctgatgatgagtgggacatggtccagggagttttaaatactttcttagatgatgaccgcttgagtggtaaataataaaaagaggactggctgtggctggtcctttttgttagttttagaaaaaagataaaaatgaacaagaaaatattagagattttagaatttggcgaaattactaagcgcttgagtaaattagcgattactggtcccgctaaaaaagaagcggaggaattattacctagtggtgattttgaacaagtacaaaatgagttaaagcagactttagctttgactaatttgctacgaattgagggacaacttcctttaacggactttcaggacgtacgtccaagtactaaacgtttaagcatgaaagctaatctaaatgctaaggagttaggcaacttattattggtattaagtttagctcatgaaattaatgatttcttggcagaaatagatccaaataaattggatttgaccgcaatcgatgcaattttagatcaattagatgtgccagatctcttatttagagaattaaagaaatcagttgattatgatggcgaagtattagatacagcttcacatgagcttgctcgtttgcgtcatgatatacgttctaatgaagaggaaattaagaataagatggatgcttatactaagggcaatagtagtaagtatttatctgagcaaattgtgactattcgtgatgaccgctatgttattccagttaagcaagaatatcgggcaaaatttggtggggtagttcatgatcaaagtgccagtggtcaaacactgtttatagagccggaagccgttttaaaccttaataaccgccaacagaatttaattgctcaagaaaaacaagaaattcgtaatattttgaagcacttatctaatttggctcgtgaagaaattactagtttgaataatattgcggctgcattaactggactagatttcttgcaggctaaagccaagttagcaaaagaaatgaaggcaagtgagcctcgtctgacacaagaccattctttgaacttattaaaagcgcgtcacccattgattgacccagaaaaggtagtacctaatgacattcgtttaggtggtgaatttgatactatgctgatcacggggcctaacaccggtggtaagacaattaccttaaaaacagcaggattgcttcaattgatggcacagtctggattatttatcccggctgaagaaggtagcaaggttggcgtctttaagcaagtttatgctgatattggcgatgaacagtcaattgaacaatcgttaagtactttttcatcacatatcaatgacattattgcgatcatgaagaatgttgattctgagaccttagttttaattgatgaaattggtgcagggactgatccagaagagggtgctagtttggcaattagtatcttagactttttgcgtaaaaaagatgctaagatcatggtgacaacgcactatcctgaattgaagctttatggttataatcggccacggacgactaatgcctcaatggaatttgacttaaagaccttgtcgccaacttatcatttgcagattggtattcctggtcatagtaatgcctttgccattgcccgcaagctagggatgcgtgaagatgttgtcaaaaatgcccagaacttaatgtcagatgaagattctgatattaataagatgatcaccaagttgaatacgcaaaccaaggcagctactgtggctcgcaatcgtctgcaaaccagtttggatcggagccaaaaattggagcaaaagttgcaacaagcacttgattggtataaccaacgtgtacaaaaacagcttgattttgcacaagagcgagctaatgaagttgttgccaaacgccgtaaaaaagctgatgagattattgcccaacttgaaaaacaaaagaacatgggcgtcaaggaaaataagattattgaagctaaaggcgaactcaacagtttagagcgtcaggctaataatttggctcataataaggtcttacagcgtgaaaaacgtcgtcaccatgtaagtgtaggcgatcgagtaaaggtcctctcatatggtcagacaggtacgattactaagaagttatctgaacatgaatatgaggttcagatgggaattatcaaagttaaggttagtgatcgcgatattgagaggattgaaaagggcgaaagtactaagcctagacaaactgttagagcaaccagtgcggttagaagaagtaatgctcatagcgagctggatttgcgaggccaacgctatgatgaagcaatgactaatttggaccgatatattgattctgttttactggcaggacttgatacggttacgattattcacggtattggtactggtgcgattagaaaaggtgtttggcaatatctccgcagcagcaatcatgtaaagaactttaattatgcaccagctaatgaaggtggcaatggtgcaacaattgtacaattaaagtaagcgtcttacttgcaaaaagtaagtataatagaatatacttataatataaataaatgaattgaaaaaatgtgaggtaataattatggttgaagcaattaatgatcaaaattttgaagaagaaactaagaatggtgtagcattagtagacttttgggcaacttggtgtggtccatgtaagatgcaatcaccagtaattgatcaattatctgaagaacgtcaagacgttaacttctacaagatggatgttgaccaaaatcaagatacagctaagaatttgggtattatggctattcctactttaatcgtaaagaaggatggcaatattgtagaccgaattactggttacactccaaaggaaaagttaaaccaaattttggatcaatatgctgattaatttaaaaatcaaaaaaagcttgagacgatgttgcctcaagcttttttgatatatcacttattttgatttacttgcttttttagcaagtcacgaatttcttctaaatagtcggcctcagttggaccagcttctttttctttcttgggcattactctatttaaagccttgatcattaaaaataccacaaatgaaatgatcaagaagttaatgacagaattgatgaagctgccatatttaaatgtagcatccccaaccttaaaaacgaggttagaaaaatcaattttgccggcaaagatcccaagtagggggttgatcaagttttttactaaagattgtacgatagcagtgaaggcagcaccgatgattacaccaactgccatgtccattacattgccacgtgaaataaactctttaaattctttaatcatgctctactcctatatctaatatatctaaaaaaatgcgattttaactaaagtatatagtagtggttatttatagtctatcaatttgcttttaaccgaagcgagcgataaattgaactttcttttctttatctaaaatattaatttcacattcggtggttcgaccagttgatttttgaaatgcttccgcgatcattccgccttcaagagagaattccttgctggcgctattcaaacgatcagtgacagtttgaccacttaattcgtaagtagtaaatgatcgtctttctttaactttttctagcttaccaaattcagccatgttgaagaattcaactaaatcatcataatcacttaaatcatattttcgcgcgattctcttgccagcccaataaagaattgaggcgtcatcatcgcctaaaatagttggcaaaaggaaatcgcggtaaagttggttaataaaatatacgtgctcgtttgtgttttctgtgttttctgtcataaacttgttcatcccttttattcttttttattttaccgtaaactagtagaagtagaaaataaatttttgattttaagagggttttattatggataatcgtccgattggattattggattcagggctaggtggcctatctgttgcaaaaaaagtaattgaaaaattgcctaatgaatcaactgtttttattggtgataacgctcatatgccgtatggcgatcgaactaaagaagagattattgaactagttagaaaatcagtccaatttttgttagagaaaaatgttaagctgataatttttgcctgcaatactgcgacagcaatggctatgagtacgattcaagcagaaatcgatccacaaattatcggagttattcagtcgggaagtttggccgcttcacggacaactaagaataaaaaagttgcggtagtttcaactaaagcaacagcagaatcacatgcttatgctaaagagatccgtttccgtgatccagaaattcaggtaacggaattagctgcccctaaacttgcaccacttgtggaggctcaaaaagatcatgaaaccaacttaaaagtagttaaagagagtttgacccccttacaaggaaaagactttgacactttaattatgggctgtacgcattatccattgattcagaaagaatttaaagaagcaattaatgataaaaatgttactatcttggatcctgcagatcaagttgcacagtatacgtttaatgtgatgcggcgcgatggtttgtttagtgatggtaatgaaaaagtcagtcatgaatattacactacaggcgatccaactagttttgatcatttagcaaggacattcatggatgatgcaactttaacatctaagcatgtggatacggagaatgaataatggttaaagaaattttatttgcgactggtaatcaaggtaaagcaaaagaactaaaagaagcctttaaacaagctggggtaaatgtcgagattaagacgaatgctgacttagacaatccgcctcatccgattgaaagtggccatacgtttgaagctaatgccaagattaaggcccatgagttagctaactttagcaagttgccaacgattgcagatgattcgggcttaatagttgatgccttaaatggggagcctggtgttagaagtgcacggtatgcaggcgaagctcacaatgacgcaaagaacaacgccaagttattagctgaattaggcggtgtaccggatgaaaaaagaacggctaaattttggactacgattgtagtttcgatgccaggtgaatttgataaagacttggttgtgtcaggtacttgcagtggtcgtattttggccgccccatgtggtgaagatggttttggctatgatccattgttttatattccggaaaaagaaaaaacttttgcacagatgactactgatgaaaagaatgagctttctcatcgtggtaatgcagtgcgaaaattgctccaagaattgccagcttggttagaacaatttgattagataaataagcttcaaggtcataatgacttttgaagcttatttgatagttaaccaaaatatttgttagtgtaagttattaagaaattgtattagaaatggatgcatgggaattactaaaccaccaccaatgagcgtagttaatacaatttttttaacaaatttaaaaatcataatacaggagtcctttctatgaataaaaaagataacgtatatggacaaaaatataagaaattgcgagtactacatcatattagtttagtgaatgcagctaagaatgtaacaaataaatctacattagcagaatgggaaaaaggtaaagataatttatcttggtgtaaagtaatacaacttctttttaatattcatattcaaccaatagaatttttagaggatagtgtatcttcacaattgtacagtgcgataacaaatattgctgttgcatatcgaaggaatgatatgcaacaattgataataatttttaaagaaaatctgaaaaaatatgaaggagataccaaaagcaaagattatatgtttcaagctgctattgctgcaaatttttatgaagatttatcagagcataatgtatgtccttcaattttaaaagataaaattattttatatttttcaaatataattgataataaaaatttttggtgttatgaagatatattttattttgggttaattacgcagttattagatgcaagacatttacacggcttttctttgaaattattagaatatattgaaaagaaccctattgattctaaagtgtggaatgaattagcaataaacgctttattaaatgctgacttttctttaatgaaaaaagatttaaaaaaagccgaagaattatacaatagattggatatattggaagctatagataattatgctgaattaatcattcgtaagaaatttttagaaagcttgattcagtatttaaaaaataatagcaatgtagagatcttttttttatttcgttgcctagattttttagatttaactaatatgaaattagatttcgaatctgcattcctacaaattaaaaagatttataacaaatgatcatcttctttcagttgaattcattaggcatgatagcattttctaagatagcaaataaatcaatttccgataattcggaaatttatcatatagcagttaaagaaagagcaataataaatttgtaaaaactataaagaaaaatttaaaaagtgtgattattatgtttttacctaaaaagattatagtatcaagcttaatgatggctactttagttggatttagtagtttagcagtggataacgaatcagtatcggcaactagctatgataatggtacacaagaaaatattgaggaacttatcccaacagctcatcatttatttacagaagcggagataaatagtttttcagagctaataacagtaaaaaatggtgaataccaagtagatcaaaatagagcaaatcaggtaagtttaaggaaagtacagttggcaaatcaatttgtaagtcaggttaacgagactaaaagagatttaagattgtatggtgtagatttagcccatccacatcataattactttacgtataaggactttagttggggaactagatattatttttcaactaatgctgctgtaacacggatgcaaaaggttttaagaaatggtaatgcagttatgggtggcgcaagtatagtaggtggagccattggtggggtaattcctgcattagcaggttcagttgtagcaaatcacttttcaaatatggctgctgatttaggagactataataatgcacatagaaataaacaaatttatatggatgtaaattggacgggaggctattcatttcatatttggcattagtttggaggtgaagatatggcactaatatcaatagctgttttagcattaatagtgatgatcataacgtgtttgccagttactcagaggtatttttacaaatatcttgggaaaatcggatattggagtcttttgattatttttattatttatctgaaaattgaaagcaccaaaatcaagctcaagtcctgtcactattgagctttcttagacgtaattagtttttatatgatctgtttcagtgcaatttgtatgaatcgtggcagttggttaataaagtcattgattacttcatctatcttttcaaaactattctgtttaagctcttttaattctgaaattaagtagaccaatgcatctacgaatctaatatcaggtaaggattcgttcattagatagaataaatctccgattgtcttatcatctgtattttgtctttcctgccaggtcaatagatcataagttattgctgtaactgcgatatagccacattggccatcatagctttgaacttgagatttatctaaagcaagatattgcttagacgtcttaaaatatgtttcaatttgccatctacgaccataaagttggatgatttcttcagggctaagctttgtctgagtagtagctaaaaccaaatacttgttcttgtttccacggttggagacaaagacgagctttaataaaaagctatgtccatgatattgagcctcaactatgcttgaataaagataatgtttctttttacggatgtttgaagcagccaaacgatcatacaagtctttaacgctatagcggcgatggcgataaatgtaataaatctttgaactcttcttgatcatgccaagtccatctaaaccgatcttctttaaaatccaaaacattcttggagaagaaaaccaagaatcgaataagacgtatttagcttctactcctaatcgtaaggcttgtctaatcaactctacagttacatcattcatctttctctgagcttgatttctccttttaccagaaattgaacgttcatcagcagtaatgggagcagctccaatcatatttttcttggttttggttgacatcaaggcaaagttaaccggcaagaaggtattgccatcgctccagcctaaagttaaaccacgatatccgttcaaatactcatgcttgtcatggtcatagactttagctagcaattcggtctttttagaaaaagaccgagccatcagcgtatcgtcaacgataaaagcaagtcggcgtcttttatcgataaatggttttaagcagccaatgagccgggctgcaatcaagcataatagtttttgccagttgattcttccatcgttaagtacattgcgagcagttctaacggaaaaacgtttgtcatccttagctctgaataaagaaagccgagcaaaatgtactgacatcagccaagagataatcatggttaatgaaacggtggatttacgcttaaaattgacttgtttagttaacttagctagaccaattagattaataaatgaagaaattaaggatttagtatcattttctgtgtcgatttgttctatactgttcattgcgcaggatctcctttactttttaggtcgacacttaaagtataacgcagagagagcctgcgtttttatttttgataagaaaaagccaagaggcgcggggaaggagcgttaatcttagctttcaagtttcagttatttatcttttaattgatatttggctctggttgagaagaccatataagaccgcagatttttggttaacatttagcagtatcaatattgcgggaattgttgctcttgttaaaacttattttgatattaaaaaattgaagtaaaaaataatcctattaaatcattaaaagtttgatttaataggattttattttgagttaaaagctaaaattttaagtgctgcttttggcaatagtttttgctggcaaactagtatctgcgaattcaatcttatttttttgcaaaatttcaatatatttacttagatacaaatttctcacagcagattgtttaccaggcttaacttgaaaatgaatggaataaacaaattttttccctgtttgttcggtcacaccgacaatagtaggacctgatacaattgtctttttctcaggctggatcttacgattgcattctttgattaacttgttaacttcatcaatatcgtttttggtatcaagatccaaattaatgtctagtgctacaccgccatgggctaggttttgcacaatggtaatgttgcggttagggatgaaaataattgagccatctgaacccttgagacgagtagttctgaggcctagttgcacgacggtaccaacattagtgccaatctgaactaaatctccaacatcaaattggtcttcacttagaataaagaaaccgttgaccaaatcactaacaaagccttgtgcgcccattcctaaagctagggaaaaaattccagcactggctaacaaggtgccaactggtacacctagaatagagagaataccgaataaatagaagaagataagggtatattgaaaaacgctgttgatcaaagcggtaatcgttcgcgttcgtttatttttaaccgtgttatgcttggctaagtaattattaattattttatgaccaaaatgggataaaaggtaaaaaatgagtgaagtaatagctaattgccaaataattgacaataaattttggctaattttactccaatcaatttcaattttctgtatatttatgtgagtaggaatcttcatttggtgtcctttctattgcttacgggtataattaagaataacaagacattaattgagaataaaggatattcatgctaaactttttttagatgttgatggaggtagaaaatgacaatttcttatggtgctttagcaggcttaattgcggcgattgcattcttaattttagtattatttacgattccaatgctaattcggaccgcgaagttgttgaaagaaactagtgcaactattcaaacaactaacgagtcaatgaagaaaatttctgaagatatggatggcttgatggatcaaacttcggatttgttagataaaactaatgacctaatgaccgatgttaatggtaaaatgaagacgttagatccagttgttaaagctgctgcagatttaggcgaaagcgtatcagaattaaacgattcatctaaaaagatcgctaaacgctttagcagcaatcatttaagccgtacgggtcttatttcttcaatagctgcgacggcatttgcaagacgcaagcgtcgcagaggtgaaaattaataaaggaggaattcaccatgaaaaaattcgcaagtttcttattaggtgccgttgcaggatgtgcagcaggttttctcgcaggttcacttcttgttagtgatgaacaagttgatgacgttaagaacaagattaaagataatgacaagcttcaagatttgaagaagaaatacgataatggtactgaaatcgtcaagaatcaattagcatcattccctaagaatgttgaagatgattcagaattgaaggattttgacgacatcgtaatcgatgactcaaataaagatgacgatgacagtgaaaatgctgaagagtcagttaacgatttgaacaatgctgaaaaagatgatactgatgcagcatctacttcagaaaaaccacaagcttaattaaagtcaaaaagaaaaggagctggtcgtgatacaatcccactaaagtggacgatttaaatacataaagtattcaattatccatggaggtgggattttttatgtccagaaaaagtaaatattcattcgatcaaaagatatgggcagttgaacaatacttgaatggtaataggagcagcgttgaaatagctaaacggcttaagatgccaagtaaaagtggagcgatgcaagtaagaagatgggttcatcaatatcaaagcaatcgtgatacccttctaagtaatgctcaatacaataatcattactctaaggcatttaaagaaaaggttgttcaagaatatttagctggcaaaatgtcgttaccttctttagctaataaatatggcattagaagcaatggaacagtatcagaatgggtttccaagtataatagtcatatagaaaatcgggactatgatccccatccggaggtctatatgactaaagcaagaagaaaaactacccagcaagaaagaattcagattgttcaatactgtcttaatcacgacaagaattacactcaaacagctgtcaaatttgattgttcttaccagcaggtttacagctggacacacaaatatctagctaatggtgaaacaggattaacagataaacgaggcagacataagaagccagaagagctaactgagttagaactggctaatcgaaaaattaaggaattagagcgtcagctcaaagaagaacaaactaagaacgaattcctaaaaaaattagatcagttagaaaggatgtgcttgccggacaaccaagatacagacaagccgcaataaaaagacgctggaaacaagaaacatatcagttaatccatgactgccatcaaaagtacaattggaagattgatttaatgtgcaaatgggctaaaatagcacgctcagcttattacaaatactttgatcctaagcgcaagccgagtaagcgtgaagaacgagacaaaaagattgaagcaaagatcattgaaataaccaagtctaacaacagtctgtttgggacggaaaagatgaccatggcagttaatcgacagatgtctgatgaaaagccggtttatcataaaactgtttaccgcttgatgtgtatcaatggcattagatcacaaaagcctagataccagaagctaaagttcaagcatacaacgcctgagaaaacggccgaaaacaagttaaaaagagactttaatgcatctagacctaatgaaaaatggtgtacagatatcactgaagtcgttgctgctaacctgcctaaggcatatctatgtactgtgtttgatctatatgatcgctatcctgttggctacgcaattagtaaacgaaacgatactgctttagttcaagcagcctataagcaggctgttaaagcataccctaatgctcatccgcttttccatagtgatcgtggttttcaatttactcgcgcacctttccaaaaccaattagaagaccaaggcatgacgcaatcaatgtctcgtgttggctgctgtattgataatggtccaatggaaggctggcaaggcattatcaaagaaatgcgagttattcttcatcctcaagtggccagttatgatgaacttaatgattctatttgtaagacaatagattactacattaatgaagatccacagaaacgttttaacggtttaactgctggtgaaatgcgcaaagaagcgatgaaaggcaatattaagaattgccctattgcaccaaatcatcgaattgagaaatactggcaaaaaatacacgaaaagaaaataagagaagccaaaaaatcctcagctgattattaatcaactgaggaataaaagctttatgtaattctactgtctacttgacagggaatgtatcatcgtgatgatcagctccttttttatgacaaaattagtctttaagtggcaaaacttttaagtccttgtcagtgtgagtaaaggtttcaaagccgtccttagtaacgacaccacaatcttcaattctgacaccagcaaagccagggatgtagatacctggttcaatggagaagcacattccttcttcaagaactaagtcgttaccttgtacgattgatggatattcatgaacgtttttaccaatgccgtgacctaggcggtgaatgaagtattcaccatagccagccttagtaatgatgtcacgagccacgctatctaattcttcagcggtgattcctggcttagcagcttcgattgcggcttgttgagcttcacgatcaacttcataaatttcgcgttgcttagcagtaggttcaccgtaagcaacagttcgactagaatctgatgcgtaaccatcgtgcatggtacctaagtcgaataaaactaattcatttggttgaacagtgttcatagttggaccaaggtgaggattagcggcgtttttaccagcttgtacgatggtttcaaaactttcatgcataacacctttttgaatttttagttggtaatcaatttgtccagcgatgcttctttcggtgacgccagttctaattgcgtcaaagccaatcttaaaagcgaagtctgcttctgcaccagcgccttgcaacttcttgatttcttcaggtgtcttgtaaagacgaagtttttcaataaaaggtgaaacatcgttagtgaaactagcgttaggaaattcaccacgtaagagctggtagtgggcaacagacaaatcatctttttcaattgcccaattatgggtatcgtgagttctctttttgacattagttgcgatgatgttccaaggattttcggaatcaaggtagccaataacgtcgccatcccatgcggaagcttttgcttcttctacgtttaaagctggacagaaaataaatggttccgcatcttttaaaacaattaaagcaaagattctctcatgtggttccattgagtaaccagtaaagtaggaaatggtgattggattagaaatgtaagcaagatcattattggagtcttgcaaccattgttgtaatttatctaagttcatattgtcctcttttcttgcaaattatgttgactgtagtatatcatgatttcttaatgaaaaaatgaaagaaaatctgtaaacgtttgcattttatgcagcgtcgtgatatctttaagtgaagaattttttggaaggactgagagataagagatgcataaacaagaagttacaatctatgacgtcgctcgagaagctaaggtttcaatggctacggtttctcgtgttgtgaatggtaatagtaatgttagaaaagagacacgtgaccgtgttctcgaagttattaaaagactgcactatcaaccaaacgctgtagctcaaggtttagcttctaagcggactactacagtagggttaattgtcccagatttaactaatttatactttgcagaattatctaagggtattgatgatattgcacttttatataaatacaacatcattattactagtattgaaaaccgcttgatgaaggaagaccaagttattcaaagtttgctgaataagcaagttgacggtgtaatttatatgtctaaccgtttatcagatgcagcagctgatgcctttaagcggactgatactcctgtggttttagcaggtactaaagacaatcgtgatgattttgcttctgtcacaattgactataagaaggctgatactgaagcattaaatttgatgtaccatgatggtaagaagcatttgggaatcgtagttggtgatcaagatgctgtagttaacagcgaaaacagaatccctgcttatgaagaattcatggaagaaaatgatttgggcactcctcgaatctatactgatattaaagactattcagatggttataatttatacccacaattagttaaagatggcgttgatggtgtaattgttactcgcgatatttcatcagttggtattttgaattctgcgatggatgcaggtaagaaagtgccagaagatttggaaatcgtgaccgccagtgctacgcagttagcttctgttgttcgtccagctttgactacgattaagcagccactttatgatatgggtgccgtagcaatgagaatgttgactaagttgatgaacaatgaagaagtagatgatactcatattgttttgccatatgaattagttaaaaagcaaagtactttaaatcaataattaagtgaagcaaaaaagaccagtttactggtctttttgttttagtagataattttgttaatctgttgaagcttttgtgtaaaagtggttggtgcaattgcttgattaggattatagggcaaaagcacgagattagtgtactgactgacccgtggtaaggactgataatctctgaaatcgtcttgactaaagaagccatagaacaagatatcttttgccttaacccaacctagtttggtataaatccacatgtttttaggactaccattaaaattttgaatttttaataattgatttgcgggtaatttttgctgcgttttggcttggttatcaggataacgataaattgtaactttttggttaggtttagcgataattttcttattttgataaggagcaatatctcgctttgttaagtcaaaattaacgaattctgccgaaataaaagttttttcagcaatttgataaaataagcgatcatctacacggacgccataagtgacattgactttttgacctggttgcacgtacttcttttctttgatgcgaacatacggattcatcattgtagcggctttagttttaccaaaataaattccagttctattaatagcgtactttttagtgccacttttggctaatttatatttaaaaccagtagcgggatagttggtaaccacgccatcaacattccgattaattagccaatgccatagggcaggcgattcgtccatttcggcccagacaaacagttgcttatgtaatttgtgaagccagtgaattaaaaagggatgctcttgcacaatgtcagaagaagcattgatagcattaacttgaggtaaattactgaaattaatgcgtttcaggctaccaacgatcaaaattagataagcttcaggcataatttttctaaagtgaaagagactagcagcggaaaatgaatgaatcatgattcttttctgcatatggtattttttaactatttgtgcgattttatcctctaactcataggacggatttaatccatgatcaattttagtctctaagacaaatttagtgtttggtttattttgataatgcttaaaaagctcactgagtgacataacgtgttcgccattgtcatattgcagttgtttaagtgctgtaaaattattttgtgatacaattgcatgtgtatgagtaactcggaagaggtcatcatcatgtgcaatgaccggaactccatcctttgagagctggagatcgagttcaacgtaatcagcaccagaattaaaggcggaatcgtcagcctgaattgtttcttcaggatatttgatgggatcaccacggtgccctacaactgtaaaaccactatttatgaaaaagactaagctaaaaaaaagaacccaaacgagtcggcttttaaatttcatgtgtacacctctatcgcatacttaacaatagcatggttacacatttttttctatttatagtactattcttttatcagtaatcggtatgattgaaatctaaaggatgagatttaatggaacaattggacttaattgaagaagttaccagaaatgatggcagtcgatattatgaaatctctaatattgaccaaaatggaattgcagaattagctgcagatcatggcttaattaaaaaagtcaaaatactgcagctgaatattcctcgaactaaggcactgattgcttatgaaaaatatatcaatgatacttatgacttgcagactttgactaatgaaagtgattggaaaaatccaaaatgggtagaatgggataaacctaagggaaaaattttagacgcatataatatgatcttaaaagccaatcgaattggttagaaagtggcataaaaaatggaacaactgcgaattttacataccaatgatcttcattcacattttgaacatttccctaaaatcggacgttacttgaaaaaagcgcaggctgatcaatcggttgatggtatctacacttttgatgcaggagactttatggatcggtctcatcctttaactgatgctacggaaggtcaagccaacatcaaattgatgaatgggtttaactatgatgcaattacgattggcaataatgagggaatttctaatccacattgggtattggaacatttatttgatcatgcggactttccgacagttttagcaaatttgcgtgaagaagatgaatcaatgcctaaatgggcagtcggccatatgtttttaactactaagaaaaagacgcgaattgctttaattggcctgactgcagcttatccaatgacttatggtcctaatcattggcatgtcaagatgctaggtgacagtatggatcacgaattagctcaaattgaaggaaagtatgatgtcttaattttattgactcatgttggattaaaaatggatcgctggttagcgaaacattatcctcaaattaatttaattgtaggaggccacagccatgatctgattgaacatggtgaaaaagtggggcatacttggattacgcaaacaggtaaatggggaaactatgtgggtgatattcatctagaacttgaagatcatcacgtgattaaggtagtacctcgcactatttctactgcttcgatgccagaagaaccggaagataaggcagtgattcagggctactatgatgaaggtaagcgacttttatcagaacgaaaagtggctaatttacctgaaaaatttgcggatgataaagtagcagccgttcaagtttctcttgatgcgattgctgattttgctaaaacagatttagccattttaagctcaggcctattcttgaccccgtttaagagtggaataattactcaatatgatttacaaaatgccttaccgcatccaatgcacgttgttcgttcaaccttgaaaggttatgatttgtggcgactagtgatggaaattgaaaagaatcggcattacctagaccattttccactgcaagggatgagttttcgaggaaaaatttttggtcagatgtattacaaagggatcaaggttgatatgcgtagacgtgtagtttacgtcaatgggcatgaaattgatccacaaaaagaatataaaattgcctgtttggatcattatgtcttagttccatttttcccaactttggctattgtcggtgaaaatgagtttttattcccacaatttttacgtgaagttgttggtaaatatttggctgaaaaatatcctttaacagcgagaagtgaaaaagatgactgaagaaaataaatttgaacaagaacagccaattagacacccacttgctgacgtggggcaagatggtaagagcattaagattggtgcgcagctttatagcatcattgtcaatgagcgagacgcacttgatttagaatctttgcgtaaaaaatatgatccttatcttgaccagtatgattatctggtgggggacgtttctagtgaacatttacgcttgaaaggcttttataaagacggtgctagaaccgcaattgataaaaaagaaatggcgatcgtggattatttaacggaatattgtaatcccggcggaccttattttatcttggaattaacgcatccagtacattattatcagcatcaacgtactaaaatacggcgatcacgtgaacgacgcgagcgcgattttggtaaaaatgagcgttatcatgcacgacgtcgaaattatcggaagaataaaaatgaaaataatccgtttaagaagcggcgtgttcatcaaactaaatttaagaaaaaacaatcaattgcagtgaaaaaagaatttggacggcatcattcatttattattaaaaagagaaagggaaactagtgaaagattaccgggtatttttaattgacttagacggaactgtttatcgtggtaaggaaacagttgaatcaggagtaagatttgttcatcgtttggttcaagcagggaaagactatttgtttttaaccaacaatacgaccagaacaccgcaaatggtagttgataaactaaagggacacggtatcgaaactgatacggaccatgtttatacgccaagtatggccacagctagctatattttacaaagagaacacaaggaaaagatcggcttgtatattattgggcagattggtctctggcgtgaattattgcaacatccagagtttgagcttaatgaagaaaatcccgattatgtaattgtcggtatggatacagatctgacttatcataaagtacgagtagcttcacgggcgattagacgtggagccacttttattgggactaatgccgatatgaatttaccagcagaggatgagctaattccaggcaatggttcacaatgtgcattcgttgctgcagcaagtggagtagagccactgtatattggtaagcctgaatcaattattgtaaaaatggctttggataaagttggctatagcaaagatgaggcacttttggtaggtgataattacgataccgatattaaagctggctttaatagtggagtagatcagttgttgactttgacaggtgtgacgaccaaagtggatattgcagataaacgtcaaccaacaattttagttaataacctagatgaatttgaattatgattactaaaaacaatattttttcgctgatttatcattttttgtttgctgtttctagcagtgtaattggggcaattgtggctagttggccattattgtttatttttatgatcgtacaaaagacatatgagacggttcacatgtctttgtttaaggtaatgcataattataaccagctgatgttttatttgctctggccctttaaaaagcagcttaaaatggataatttccctacatctgctaatgcggcagaacattttgcggaatgtaagcatttatttattctgactctattagtttttattatctgcatcatagtgcactttgtttttaaacgacaaaagaaaaagctactgcttaatttggataaatcagtagcccttattttgctattattgccaattattatttttccatttgcagtaaccaatttcgacagtttctttgtgatttttcaccatattttgtttaacaatagtgattggctgtttgatcctaatactgacccaattatcaatgtgctaacggaaggcttctttgcttcttgttttgccgttgctggggttatttatgaattatattttgctgaaaaattattacgtaagtaaaaaagagttccttagtggaactcttttttgagtgatatttttttcttgattgcgacaattgcgattggcacaactgatactaaaatgatagcaattacgatcattgaaaaatggtcctttacaaatggaatattgccaaagaagaaaccgatgattgtgaacaatcctgtccaaagcaagccacccaagatgttgtaggtgataaatttaccataatgcatcttactgccgccggaaatgaatgggacaaaagtacgaataaatggtataaatctacctataacgatcgtaattggcccgtggcgctcaaagaacttttcagcggccaaccgattattttgattaattaatttattgaaccagctatgtttttcaccagctctggttgaccaggcaccaatttcatagttgatactgtcaccgattatggcggcgaatgctactataagataaactagccaaatatttaagccatacttaggattagcagccattgcactcgcagcaaaaatcaacgaatcgcctggaagaaatggaaaaacgactaagcctgtttcaataaaaatgatagcgaataagattaaataggaccaaccaccgaattggttaacaatcgtgattaaatggtcatcaatgtgcaaaataaaatcgattaaactcatctggaactcctaaaaactagttgaatgaattgtcaaagttttttcagggaaaagatcacgcataatcgcggtgattgcaatctgggcttcgccaaaaccgagagcgattaaagggacgcgtccaggataggtaacaacatcgccagctgcataaacaccggcgatattagtttgcattgttgaattcaccttaatttgtgcgccagctaaatcgattccccattttttgacaaagcgattattagctttaaagccatatgcaacgactgcttggtctaacttgatattagttaaactatcttttcccatttcttttaaattaacgttcagttgattatcaaccaaattgatttgtttaggaagatagggagttaaaatttcaacattttttaaagacttaagttttttgacattagattcaagaccgcgaaattgattacggcgatgaatgattttgacattggcataattagctaattctagtgccaggtctaatgctgaatcgccgccaccaaagacgccaactgtttgtccgacaaatttttggggatctttaataaagtaatgaatccttttttgagtatcatcatccatagataatggtaaagctttaggtttaaaggcaccggcaccagtggtaatcaatatgctgcgggatgcaactatatcatcgataataaagccgtctttttgtttagtgacattttcaactttatggttagtaaaaatagttgtatccgttaaattatgtcgtaaattgtcgattagttcagttcctgtaatagagtcgtaagcaggaatatctttgattttcttaaaaggataaagcatttgtggctgtccgcctgtttcagataatgaatcaaacagtacggtcttgagtccatgaagattggcaaatcgcgcggcaaataggccaacaggtccgccaccgataatagttaaatcaaattttttaattttaatgacctcctcaaagtagtgatgtatcaactttaacatgaattttgtaaatattcatttaaaaataagcttgtcaaaaaatgaattttaaggtatattattgaagtcgcctttttaagagcgagcataattctttattaaaaaatacttgcaattaatattcaagtattatatattaataaagtcgcttcgagagatgcgacgagagcttaaaaacagacatgcaaggaaagaaaacaaataaaaagaaaaaagtacttgcaaagaagtaaataagctggtaatatatttaaatgtcgtcaggtgaaagcagaaaaagcttgagtaagacgaaaaaacaaatcaaaaaagttcttgacaaagaaatgatggtttgataaaatataaaagctgtctgctttgcaaaaaagcaagacagaggtagtactttgaaaactgaacaaagtttcgctaaaagtgtgcgggtgtaaaaaaccaaacaagaagcgaagtcaattcgcaagcaataaatttgagacaaagatcttaaataaggaatgagcaatcattcaaactttttaaaatgagagtttgatcctggctcaggacgaacgctggcggcgtgcctaatacatgcaagtcgagcgagcggaactaacagatttacttcggtaatgacgttaggaaagcgagcggcggatgggtgagtaacacgtggggaacctgccccatagtctgggataccacttggaaacaggtgctaataccggataagaaagcagatcgcatgatcagcttttaaaaggcggcgtaagctgtcgctatgggatggccccgcggtgcattagctagttggtaaggtaaaggcttaccaaggcgatgatgcatagccgagttgagagactgatcggccacattgggactgagacacggcccaaactcctacgggaggcagcagtagggaatcttccacaatggacgcaagtctgatggagcaacgccgcgtgagtgaagaaggttttcggatcgtaaagctctgttgttggtgaagaaggatagaggtagtaactggcctttatttgacggtaatcaaccagaaagtcacggctaactacgtgccagcagccgcggtaatacgtaggtggcaagcgttgtccgaatttattgggcgtaaagcgagcgcaggcggaagaataagtctgatgtgaaagccctcggcttaaccgaggaactgcatcggaaactgtttttcttgagtgcagaagaggagagtggaactccatgtgtagcggtggaatgcgtagatatatggaagaacaccagtggcgaaggcggctctctggtctgcaactgacgctgaggctcgaaagcatgggtagcgaacaggattagataccctggtagtccatgccgtaaacgatgagtgctaagtgttgggaggtttccgcctctcagtgctgcagctaacgcattaagcactccgcctggggagtacgaccgcaaggttgaaactcaaaggaattgacgggggcccgcacaagcggtggagcatgtggtttaattcgaagcaacgcgaagaaccttaccaggtcttgacatctagtgccatttgtagagatacaaagttcccttcggggacgctaagacaggtggtgcatggctgtcgtcagctcgtgtcgtgagatgttgggttaagtcccgcaacgagcgcaacccttgttattagttgccagcattaagttgggcactctaatgagactgccggtgacaaaccggaggaaggtggggatgacgtcaagtcatcatgccccttatgacctgggctacacacgtgctacaatgggcagtacaacgagaagcgagcctgcgaaggcaagcgaatctctgaaagctgttctcagttcggactgcagtctgcaactcgactgcacgaagctggaatcgctagtaatcgcggatcagcacgccgcggtgaatacgttcccgggccttgtacacaccgcccgtcacaccatgggagtctgcaatgcccaaagccggtggcctaaccttcgggaaggagccgtctaaggcagggcagatgactggggtgaagtcgtaacaaggtagccgtaggagaacctgcggctggatcacctcctttctaaggaagcgaaggatatggagagcaggaatgctaagagaagtatccagagcaagcggaagcacactgagaaactttgtttagttttgagggtagtacctcaaaaagagctagtacattgaaaactgaatataatccaagcaaaaaaccgagacaatcaaagagaacagattgtagagcgaccgagaagagaattcttgagtaaggtcaagtagaaaagggcgcacggtgaatgcctaggcactaacagccgaagaaggacgtgacgaactacgaaaagcttcggggagcggtaagtacgcagtgatccggagatatccgaatgggggaacccaatgcagagatgcattattgattagtgaatagatagctaatcaaaggaagacgcagtgaactgaaacatctaagtagctgcaggaagagaaagaaagatcgatttccttagtagcggcgagcgaagaggaaagagcccaaaccaagtgatttatcatttggggttgtaggactgcgacgtggcagtgtaagagatagttgaattatctgggaaggtaagccagagagggtgagagccccgtaagcgaaatctcaagcacgcctagcagaatcctgagtaggccgggacacgaggaatcccggttgaaaccgcgaggaccatctcgcaaggctaaatactagttagtgaccgatagtgaaccagtaccgtgagggaaaggtgaaaagaaccccggaaggggagtgaaaaagaacctgaaaccgtgtgtctacaagtagtcaaagcacattaaagtgcaatggcgtgccttttgtagaatgaaccggcgagttacgttatctagcgaggttaagtcagaaaagacggagccggagcgaaagcgagtcttaatagggcgaaaagttaggtgacgtagacccgaaaccaagtgacctacccatgaccaggctgaaggtgtggtaaaacgcactggagggccgaacccacgtaagttaaaaattgcggggatgagttgtgggtagcggtgaaattccaaacgaacttggagatagctggttctctccgaaatagctttagggctagcctcgtggagaggataatggaggtagagctctgtttggactaggggcccgtcaggggttactgaatccagataaactacgaattccagatatccatacacgggagtcagactgcgagtgataagatccgtagtcgaaagggaaacagcccagatcaccagttaaggtcccgaaatctatgctaagtggaaaaggatgtggagttgcgtagacaactaggacgttggctcagaagcagccatcattcaaagagtgcgtaatagctcactagtcgagtggcgctgcgccgaaaatttaccggggctaagcatagtaccgaaactgtggatgtgttttaaagagcacgtggtaggagagcgttctaagagcggagaagttgaatcgagaggatcaatggagcgcttagaagtgagaatgccggtatgagtagcgaaagataggtgagaatcctatccgccgaaagactaaggtttcctggggcaggctcgtccgcccagggtaagtcgggacctaaggcaaggccgagaggcgtagtcgatggataacaggtagagattcctgtactgtgtcaaatcgttaagagcgaaggagggacgcaggaggtgaagcacgcatcgcgatggaacgatgttcaagcaacaagtgcggttaagagtcaaatgcttctaaccagcaacacgagttgtgaagaggagtgaattaaaagtagcgaaggtgtggtaatcacactgccaagaaaagcttctagccagagatgacatacccgtaccgcaaaccgacacaggtagtcgagtggagaacactaaggtgagcgagagaactctcgttaaggaactcggcaaaatgaccccgtaacttcggaagaaggggtgctagccaagagattggttagccgcagtgaataggcccaaacaactgtttatcaaaaacacaggtctctgcaaaatcgtaagatgacgtatagaggctgacacctgcccggtgctggaaggttaagaggagagcttagcgtaagcgaaggtttgaattgaagccccagtaaacggcggccgtaactataacggtcctaaggtagcgaaattccttgtcgggtaagttccgacctgcacgaaaggtgtaatgatttgggcactgtctcaacgagagactcggtgaaattataatacccgtgaagatgcgggttacccgcgacaggacggaaagaccccatggagctttactgtagcttgatattgagtatcttttaaacatgtacaggataggtaggagccagagaagataggacgctagtcttattggaggcaatgttgggatactacccttgtttgaaggatgctctaacctcgacctgtaagccaggccagggacagtgtcaggtgggcagtttgactggggcggtcgcctcctaaagtgtaacggaggcgctcaaaggttccctcagaatggttggaaatcattcgcagagtgtaaaggtataagggagcttgactgcgagagagacaactcgagcaggtaggaaactaggacttagtgatctggtggtaccggatggaagggccatcactcaacggataaaagctaccctggggataacaggcttatctcccccaagagttcacatcgacggggaggtttggcacctcgatgtcggctcgtcgcatcctggggctgaagtcggtcccaagggttgggctgttcgcccattaaagcggcacgcgagctgggttcagaacgtcgtgagacagttcggtccctatccgtcgtgggcgtaggaaatttgagaggagctgtccttagtacgagaggaccgggatggacgcaccgctggtgtaccagttgttccgccaggagcatcgctgggtagctatgtgcggaaaggataagcgctgaaagcatctaagtgcgaagcccccctcaagatgagatttcctttgcgtaagcagtaagacacctcagagacgatgaggtagataggctgggagtggaagtcctgtgaaggatggagcggaccagtactaatcagtcgaggacttgaccaaagcgaagcaaactggaaggttttttgcgagaaggattatgtttagttttgagtgtaaaagctcaaaagagtacggtggcgaaagcaagaaggatacacctgttcccatgccgaacacagaagttaagcttcttaacgccgaaagtagttggtgggcaactgcctgcgaggaaaggaagctgccgtgctcaatatggaggattagctcagctgggagagcatctgccttacaagcaggaggtcacaggttcgagccctgtatcctccatatcgagtcgttagctcagttggtagagcaacggacttttaatccgtgggtcgagggttcaagtccctcacggctcatgaccctatatatgcgggtgtggcggaattggcagacgcgctagatttaggttctagtgttttcggacgtgtgggttcaagtcccaccacccgtattgccaaccacatattgacaatatgccgatttagctcagttggtagagcatctgtcttgtaaacagggggtcgtacgttcaagtcgtataatcggcatttatattacgcggaagtagttcagtggtagaacatcaccttgccatggtgggggtcgcgggttcgaatcccgtcttccgctttcatcaacacgccggagtggcggaattggtagacgcacgggacttaaaatcccgcggttggtttcaaccgtatcggttcgactccgatccccggcattgatgatgcgcccttagcgcaactggatagagtgtctgactacgaatcagaaggttgaaggttcaaatccttcagggcgcatataacgggaaatggctcagtttggtagagcacctggtttgggaccagggggtcgcaggttcgaatcctgttttcccgattgtaatctaatggtgattggttacattttggcggtgtagctcagctggctagagcgtccggttcatacccgggaggtcgagggttcgatcccccccgccgctataattgtaagcttggacctttagctcagttggttagagcagacggctcataaccgtcctgtcgtaggttcgagtcctacaaggtccataatatggcttttatattaatatcgcgggatggagcagtctggtagctcgtcgggctcataacccgaaggtcgttggttcaaatccagctcccgcaatttggtccattggagcagtggtttatctcgcctccctgtcacggaggagatcatgggttcaaatcccatatggaccgtaagatggctcggtagctcagtcggtagagcaaaggattgaagctccttgtgtcggcggttcgattccgtcccgcgccatttcattttatattaggtgcgggtatagtttagtggtaaaacgaaagccttccaagctttagtcgcgagtccgattctcgttacccgctttatatgggcctatagctcagctggtttagagcgcacgcctgataagcgtgaggtcgatggttcaagtccatttaggcccattggagacatactcaagtggctgaagaggcgcccctgctaagggtgtagatcgggttattccggtgcgagggttcgaatctctctgtctccgtattatacattttagagtagctaagaaccgcgtggttatgcggttcttttgctttactctcattttttgatagaaatagcctttttaaaaaagcccattaatatctttacgaatttcttcctcaccatttttggttgtgtgagtataagtacctagcgttaaatctagactcttatgtccaagcacatttttaacatctaccatattccaaccattatcattagcaattgtagcaaaactatgacgcaatccatgaaccgtaatctttttaagatttgggttcttttcgtaaatttgctttttccacttgtcagccttactagagcggtaatagtcgcccttagtattgtgaaagacaagtgggtttagatctttacgacagtgaagcgaaacttcatatactaagtctgacataggaacgacacgggtttcatttcctttaggaatttgggtgccataattattagtttctatttctccgttgcccttaattttgagcttgtaagctgttgttcgctgaatgtgtatggttttatgcttgtaatcaaaatccgaccagtggagggcaatagcttcgctcttacgaattcctgtggttgcgaggatcaagaagtaaaagtaaacctgatcactaatttcttttgcagtgtccaagaatgattttagctcatcgatcgtatagaagttatgtgatgtatcacgtcccttaaccgttgattttttaggtaaaagagatgatcttgcggggttgcgattaatcagttcaatgtctactgcatactctaaaagtttgtgcaagtagttaaaaacagtccgatatcttttatactcattagctaaagaatagaaataatctgatatggctttagtggttagactgtcaacataggactcaccgaattcaggcttgatatgtaagttgtataattcgtaagttttctgtgcggttgagggcttaacgtctaggacatagcgtttaaaccattcattccatagctgatctacagtatattgtttctgcttaacaaaatcttgaggattggttgcggctagctgcttatatacagcatcagcctcttcatagctcttaaagccacgacgaaaagtttgtactttttgaccattcttttgacccaagtaaatgtaaaacatataacgttttttaccacttttcagcttgtatggcttaattgcggtattttttcgtctaggcatattttcacctcctttcaataaactagtgttcttttggattgctaaatataaactcaccactcaacggagtaggtgagctttaaaaattagttatagtcgtcgtatttgctacttccaaatatgcctttagaaccaagtacaaaataatcaaatacttcttttctaatttcatctatttctcttggaaaattaaaaggtaaattacagttcttagtaaaaaggctaaaagtttttttgtcattgtaagtacgtatattacgggacttccagtcttttaattgctgagttaaaagcgtgtcatcgtacttgtctaataaaagtaacaaaataagcagaataccataaataccgttaccaagctttttattattaaattgattctttgtaaaataatcatcaataactaattgggcttgattgtattttaaattataacggcttttgaagtgtataagtctgtcaccatgagctaaggaatttctaaaatcatttatagatctaatcatagtcgaaaacagttcaatcaatttattattaaattcattctctagctgggcagttgctttatcaattacagaatctgtatcatgttctaaatcaacttttttctctaattcagctcgtatattatcaaaaacatattcgtcccattgatcttgtaaatgagcagtaggtctagaaccgtaatcttggcttagaattggaagcatagatttaatcacatacatctttaattttcgcggaaaaatgctaaatagcattctagtttcaccaaacatagcatcatttaagagaatccatggaggaattacgtcgtagttttctttataatattttagaggctgacttcgtggtttttctataattgtttcaaattgatagagaatattttctgtttttctggcatgtcttgaattaaaattgtgaggatttaggcaatttttaggatctacaccaaaattggaagccaatgcgtagctcatattttctttaagtcgttgctcaatatttagagtgaatctaaataaaatatcacgtaaatcatcttccatacggtgatacttatataaatcctctaaagtagtttggataggatattcatgttttccttttcggtataaatcctgtttataccgattcactaagttataatatccacgactttttaatagttcaattccaattctgtcgtttgttattattaagccgtgatctcttaaaagatctaattgctgttgataagttaagaattttaccttctttttcatacgaaaaacacctcatggaacatttaccatgaggtgttttaacgacccgtatactttacaggcatttcagctatagctcaatgataaatgcaaaataaataaatgtcaacttttatgtagaaatagtattcactctacattgtgtttcaataattcttttgactctacatcaatttaaaccaagagtaatcattgtagcgtttgacaatggtataatcgccgctacgacctgggatgtgcatataccatccaaaatcagccccagtctgttgtatgcgtaccactttgttctttttcaaccttatttttggtccaacagtacttctataatttggagttttccagtgaatttttctaacgtaagttgttttagttaatttaactttacgatagctttgattgtgctggctgagcaaaacagcagcctttttactgatggcttggactggttgagacgtggttaacgttaatgctgagcctaatagagtagcggtcaacataacaacaaattttttattcattttatgtgttccttctttaatttaagttaatagtcatgtcataagtgtgatcaaaattgtcaatatcatcatctgtatcttgattttggcaatcgaatttgaacctcaaagatttgatgctattaacgttttttaatttataaataggaacataaattgtacctgtcttagatattcctttatctatttcgtcccagtcttctttagtttcaatgtcatgctgctcgttaatacttgggatgctgacagttgctgaatccattgcggcttcaatatcttttttagctttgacggttacattaatggctaagataccttgcactgcttttccgccacgcttagttccgtatgtatatcctttttctgtcttataaacagtaacattattaactttggcagtagcacttgaccatgaagtgtcggcaccattattgattttgaatttcttagagtcgttgtagtaaattttatgaccatctagtcgaacatatttgttattttggtttgatgattcgcttgaactaggtgatgtactttcagttggctgttgtgataaagcgctagaaactggtcctgtaatgcaaaaccaaataaagacaaaaagtatagttactaatgtgtgaagcacacgcttttttccatgtaggtcttttttagatctatcagtaatccgccaatagagcaatcctagtaatgctagaaacataatagtagaaaatatgcctctagctgaactatcattaagactaaaaataccagaaactaaaattaagctagtaatgacccaaaagccccaatcttttagccacttactatcattgctctttttatcatgttgaactgcgtaaacaattaataaaattcctgcaattattgctattaatcctgccattatctatatcctccaaaataagtattgccttaggtttaaagtcactggtgttgtggactagctgattttattcaaaattaacagtatatctgatcaattttcctataatccttcctgggttttctttattgagaataataggagaatattccctgttatcaggtactaacattacttctttaccaacatgtctaatcctctttaatgttgcctcaccatcaataagaacagcagcaatctcatcatcttcaacagtcggttgttctctaattaaagctattgcaccatctggaatggttggctccattgatcttcctttacatctaagctcaaaaagagttccatcagggacatctcctataaaatattcaggaatatatttttcaatattttgatctgctgtaataggtgtccccatcgcaatagttcctatcagtggaacatacttaatgttttcattattaatagaagtaatattaggtggaatattactttgagatgacttgactttgtaagttcctttaggtgcttgttcaacaaaatccataatgtcattaaaagtatatcggggatcaatatcacttttctttacgtttagaacatttgctaacttttctaagttacctgcattaggcgttgacttttcccttaaatatcctgaaagtgtagtcactggaatacctgccttatatgccagatctgcttgtgtcattccatgcatgtatttttttagattatccgctattgcatgtcgagcattttgttcaaaagcagatagtttatttcgcggcatttaaattgcctcctctagtagttgtgtccttactgatattatactaggtatttcgtaattaactaactttttttgaaaaaatactagttttttagttgatactacgaataaactagtataatataataaatgaattgaatgaaaggaggagcaaatgagcagaaacgacttgaaaatgacccttgaagctgcacgtgttaatgcaggctacacacaagtacaagctgcaaagatattaggattaaagccgacaacattagcttcttgggaaaaagacagtactaggctttcctatgttgaagcacatagattagcaaggctttatagaattactccggatttacttttttttggcagtaaatacgagtttattcgtaaaatgaaaggagaagaacaatgaacgaatttcaattatttgattttgaaaatcataaagttagagctttatcacttaatggcaaagcctactttgttggaaaagatgtagcagcagttcttggatatgcaaaaactgccaacgctatcaataagcatgtagatgtcgaagataaaggggtcactaaaatgatgacccctggcggaagacaaaatattcagattattaatgaatctggtgtttactctttaatctttagtagcaaactgccaaacgctaaaaagttcaaacattgggtaactagtgaagtcctcccaactatccgtaagcatggggcttacatgacagatgaaaagattgaagaggtcttaaccgaccccgacacaatcattaagcttgccactcagttgaaagatgagaggcaacagagattaattgaacaacaactaagaaaagatgctgaaaatcaagttcatgaaatgaaacctaaagctttgttcgccgattcagtggcaactagtaaatcaaccattttgattggtgaactggctaagatcttgcgaggcaacggcgtagacattggagcaactcgacttttcaagtggatgcgtgcaaatggctacctgatcagtcgtaaaggcagtgattggaacatgccaacacagagggctatgaacttaggactgttcaagatcaaagaaacaaccatcaatcactcaaatggctctacttcaatcagtaagacgccaaaagtgactggaaaaggtcagcaatacttcgttaacaaattcttaaaaaaacaagctccaaagattgtagctgataagagcggaattaaggctgagtaccaaaacggcaatatcattggcgcaattaattcagatgggtctggatatatcgcataaatggaggtgatagctatggatgacctacagcacggtatttatcgcatggtagcaagggaagtggcaagaactcaaccaaaaagagaaaagaatttccttaacaaaaaggacgctgaaaaactgattaagaagtatacaaggcaatacacacttcaagagttcttgaatgcaactgaagccgcatatgtttgcggtatgagtcagacaaccttttggagattcagacaagaacataacgttcctgtccatgtgattgacggaataaaaagatacaagcgttctgagctgatcgcttgtgtagagaagtatagcgtacgtgggtacgcataggagggcattatgccagattggggcactactaagcttgatcatgtattgagttatatctgtaagggatttgaaaaaatgttggagttttgcgccattgcatttttaccagcagctgtcatagagcagttgtgtgtctatggtgtaacccacccagatcaagtgatctcactgttagttgtgcttatgctgattctttcagcatttgcagtcaaagaagttagaaagatgaaggagaaaaagtgaagctatggcacaagtttatcaaccacatatgggctatcaacgagccggtaagtttagcgaacgccagcttatccttgttgctcactctaatgctattggcgctcttagtggtgctagttttgcggaactgtcagtaaacgtgaaagaatttttaggcattaaaaaagccctatgctaggcaaagcacggggcacatttacaaaaaataatacataaggagtatatcacaaaatggacacctatagattaaatgatttaaaagcaaccgttggcatgtttggtgatttcacccactttaaagatgtaatcgactttatttttgaaacaaatcctttcaaaaaggcattagatatttttgactgtgatgacgttggtgacctctcagaagcaatcacaaacgacaaaggtgaatttgatgaggatttagccaaagacctttgtattgactgtttagacggcgaaaacgtggatgatgaggaccccgaagccgaatggggcgatcaaatgtttgatagagcagttggaaagtaggcacaacaatgacagcaaagatggacgacagtttctacaaattcatgcttaattcacacgatcaagcagttcatgacatggtgcagtcatcgatggaccagtcagagtactggaatgatgctctagacttgattgatggctatgaagcagctgcgcagaacgatcacaagcacgccagtgaagcaaccgactttatcggattgtgccaaagagcaagatcagagatcaagagattagcgcttatgcaaaggatagacaaagatgacagagaaaaagactgaaactaaagaaaaagtaaaggtgcctatccttactcaaattcaaaatgaattgaaggcacctaaaaatcaaaagaacgattttggtcactataactatagaaaagctgaagacatcgaatcagcattaaagccacttttacttaagtatggtgcaaccctttactttgatgaagatattaagcaagtgggtgatcgctactacattgttgagattgcacactataaggatagtgagcaagagcttatagtgcatggacatgctagagagcccttgagtaaaaaaggaatggacgatagtcaaatttctggtgcagctgaaagttatgcaaccaagtatgccttggctaagctatttcttatcgacgacactgaagatgctgactcaatggacaatcgcaattataagccagcaccgcaaaaagaatctaagacccagcaaatagctaaagctagggaatttaaagttcaatatggcggcagtactgaaaagctcgtggacattatcaaatggtgtaaccaaggggataaccaagcagacaagttccttgaatcgtggcggaatcgaagcaaaggtaacgagtcagcatatcaattcatcattaagcacaatttagctagctaggaggtggcactcatgccaaggctaattaaaaaagatcatgggaactatacaaacgtaagtaatgttcttgtgagagactcacgtctaacttggaaagcaagaggaatattcctctacctatggagccaagctgataactggcaattctatgtcaaagaattgcttacacatgcccctgaagggaaagagtctcttcaaaatggcttaaaggaattagaagagcatgggtatcttcaaaggattaatcgacattctgacaaatcggggaaattcggcggattagagtggattttggacgatacgcccgccgacgggcaaaacagccaaaatagtgggaaaaagtcgggtttgccgtcagacggaaaaaccgtccaacgggaaaaccgtccgccggaaaactcgtcactaagaaataacaataataagaaatatcaaatgcaagaagtaacaacagaaagaaaagaatatagttcacctgctaaaaagcaggatgaaccgcctatcccctacaaagaaatcattgactacttaaatcaaaagacaggtgctcactataaaccatctagtaaagccaataggtcactaatccacgctagatgggaagaaggataccgtctaacagacttcaaaaaagttattgataataaggcattttcttggcaaaacacagacatgtggcgatatatgcggccgtcaaccctattcagagaatctaagtttgaaagctacttgaatgagaataacttaactaagcatatgagagagccaacaagtggtggatatactggaacacctgatatatccagcatgtcagacgatgaattaccgttttaggaggcggtctaattgcaaggactagaaggaattaaagtaccggtacgtcagtctaatcaagtttgccctattcatggcactaggatggtatacagtgatcgctttccaaccccattttgcgaaaagtgccagctagaaaagacacttgaggaaaagaaaaagtttgatcaagtcaacagcattaagattgctagaagcaatttaaagcgtgtcagcttagttgataatccagacgagtataatcatgcctttgacaattttgaagccaatgagggcaccaaagaatggcaaatgaaagaagctgcacgcaaactagctggtaagtactttaaagaccgtaccgcacaattcaactcaatcatgtacgggacgccgggtgaaggtaaaacacatcttgctatggctatgcttaacgcagttaaccagtttagtgagccaccgcagaaatgtttatttatcaacgttacaagcctatttctagcaatcagagatagctttgacaatcctttagaaagatggactgaaaaatacgctgtaaagacgctaagcaatgctgatttattagtgattgatgatctaggcagtgaatcagcaatgagtgcaaagaaaggcgaagctagccagtttgtccagcggatactttaccaagtcacgaacaggcagcacaggattatcgttacaaccaatcttactttaagtgagttacggcagacatataatcctaagctgattagccgcttgctagctggctctagcggaagccaactggactttagcggaatcgaggataagaggtactaaaaatggcaataattaaatatcttacaaatgatgaacaaagctttcaaataggagactttgtaagagtccctaaatcaagccgctatattccaactgagttcggaattattactaagattagttcgcgcgaatacacagttactgatcttcacgatggtgtaacttatccatcgagccccacaatagatgatctagtaaaagcttgtcggctgcagcatattacaagaccatttgtaattactcctggaaaggtggcaaacaatgactagacttaagtactacgaagcaagtgttgataatgataactttgcaattgtcgaagctgcaagctctggacaagctaaatataagtatattcaaggggacgtaattccatattttcagggatatgacaattccgaaattccttttacagatattcgagttataagacggaaaaagctagacaggtttgatcctgatgatgacttcaacattttaaaaacgttgatcaacgagtatggctgggaatttaccgatggatttgctacctgtctatatgctgataactacagcgatgaaaatttgagacattatatcaaatctggggaaattgataatcaggaggactgaagatgagcaagaagacaattagattgaccatgaaagaactaatgtctcttgaaattggtttagatacaggtgaagaagaattcattgataaagatggtttggattggtttccagtatttgtaagaagtcctgaaggagttgtgaaagttcaattctttaaaggtgatgaaatggataacactgatttaccagtacgtattactttgggggaggattaaaaatgaaagcaaaagaatttttgcaattagtaaatgattcaacttttttcgaagcaagatttattaacaagaatcaagcgattcggttgttgtattgtaacatgcccaatcaatcaaagccagatgttgaaattttagtcaacattaaaactggtgacattactattaatcaaactagaaaacttgagttgttttccattaatcaattggatcaagtgcttagccttgtttacctatttcttggtcaaaatagaggattagcttctgcaatgtatagtaataaaactaatactgagcaattttggaaggagtaaaaatgaaagttaaagtattcgatacctcattagaaggtagaggtcatgcaattgggtcatttacccttgaggatttaatgaataattggcttcatgagcataagaatgttgatattaaaagtgttcacatgcaagagtgtttaaatggtcagttgatggtacttgtcatgtatgaggagaaaaagaagcaggcatcttcagcaacaagaattcaatctttttgatggtgaagatcctaatgaattcctgaaaaatcatgacgttgtcgaagtagtggactacgcaattgaacaaagaaaaagaggcattggaggctaaatatgacggacgaaacagtaaagaaaactcagaaatcagtggaacgtgcggatgatacaacaatcgcattagactatatcaaatctgcgatagtggttgactgtgctgaaagcctcaccgcaaatgatggtcatgttttgaccgatgaagaaatgcgaatagttaatgcgcgccttcttatgaaagcactgaccatgcttgatgattatgaaatgcaagaggtaattagacatctcaatgacgaagaacacactgaacttcttttaaaattgatcgattctgaattcgctaagttaagacaagagcataaagacaatgattttctgaaaaggtgtacgcaatgacgattaaagagctttacagaaagctaaaagaaaaggataaaaattatattgtaacggaaaaccagtggggcactgcttttactatttattacaaggaaaaaggttacaagctattgcatgttgatttcagcgaactagttcaactttatggttggaacttaaagcttgaaggattgacctttagaaaagaactaattgatttagtgatttatcctttgcagttaataaaaaagctagatgagcctttgtgtacagatgaaatgccacttcttgatggctttaatgatgaaagagaggtcaagctatgaaagaaattgatgatcaagtactgcttattgttaagtacgtacgagaacttaagcaggcagaagatgttggtgattgggataaggtgatcggcttgtctgatgctattcaagatagtggtcacaacattggaaaagctgcagacgaaattaacgtagctatcaagaaggggatgcacattggataaattttcagtaactaacttagcagttggtacaagaggtacagcaaaagagttcttagctgcccacactcgtgattttttaggacagtatggttttaaaactcaggtgtttgaagatttaatggtctttatgagcgtcaaaacaaaatacggtgaaatggtagtccacaaaggtgacttcttagtctacgtgggtaaaggaatatggagtttaagcaagaaatgcaacaagtaactattgaatgcctcgacctgaacggaaagaaacacacaaataaaattgccattcctgcaggtcatattaatttaagcagaattgatgactggttcagagccggcaatttaaatgttagagcctattcagtttttagggaggcaaccaaatgagtgagaaagaaaataaagcattaaagcatcctactgttaaatgtcatggaaaatttaaaaccagcatcaaagttaatgctggtaagggtgaagtagtaatcgattttattgctgatcaatctacccttgatctgaatcagttgggcagaatcttacgagatggtgctacagccatttttgtgagtgaccagacagagtttccgcttgatgatgaaaaagacaagaagaaggacgacgataagcctaaggaagccaaaggtcaattaagtttgttgaaggtggaaaataatgagtattaaagaatttcagcaaagactagaaaaaattagtcctagattgcatcttaatacctttgaagacacaggtgagccttcaaccataattcttgaagacaaagccggtggtgaagactggatagtttatcacttcaagggacgattatttacttccagcagtattgtgattcttacaagcacaatacgtgctcaagattttgataagctgcagcttttaattaatgattactgggattcatttaacagacctggtaaagcatttggcaaagaagacgttcttctaggtattgcaagtgatgctatttcagctttaaaagaaatgagaggtcaaaaatgaggccttattgcaaacagatcactaagcacggccaagagacaatgatgtttaagtgtgatcagtgcggtcatgaagtagcaatagatgcttacgacatgtttgttgctgatttgaatgtcttttgtccagtttgtggtgctagtcctgagcatttgaattataagtcatgtggtaataagtcaaatgaaaggcgatgatatttgttctttttgatcataaatttgagtatatgaaactaagccttggtaaaggttgatttttttaatgttaaacttttgtttacttttaaatttagaccaatttttgaaattaagacctcggtgtcctgtacagtttgtcatctttgagcaatttaaagataactcgtactaattttcttgcagttaatgtgcaagcacgtttatgcggcgagtagacagcttcatcatacttcttttggtaatattttttgaaaacaggatcatgtaatcttgctagattggcagcttcaatcaagtaatatcttagatatctgtttccagtcctggccattggagtatgttcgttgctgtgatctcccgattgatattgattccaggttaggccggcatacttagccagctgttcttctttatcaaagcgatcgatacttccgatctcagcgataataccagctgtataggttttgccaataccgggaattgattccagaattttgctttctggtaatgcatcaacgatacgatcaattgctttttctagatctttaatagattcattaaagctttgaatcatgttgtaatgaacagaaagcactgcatcaattgaatcagtcattactttgcctaagcgatatgaacctctaacagctttcttaattgctttagccaaggtatctggatcggaaaagcgtcctctgcctttaacctgtaagtaagaaattaagtcttcggtaggcatatccgcgatctcatccagagttttactatcggttacaatagacatcattgtagcaccgaaaagaggagtattaatcttatctttatcgacagtgattagtttattaacccgataatataaagcttcaatgaagtgctgtttggtacgagtcagttcttgaactaattcatatctggtacgcgttaaacgctctaaagcaagatagttgtcttgtctggcaatgcttactcgataatgtccaaagcttagatacaaagcaatgtaataagcatcgagaggatcagttttactttcttcaaagactttatgaaacctgctggtttctttggggttaattacatcagtctctacattgagcttttgtaaatcttcgtcattttggaaaaagtaagcaggatgaaaactgtaaatagatgtagcttccatgccaataatgatttgatcatagtgtttattttgagctagatctaaaatttgttttttcagttcactagcaccataaagatcattgacaaagctatcgttaattaagcgtttgttttgatcttctgaatcaagtgcaacgacctgtaaatctttagaactaacatcaataccgacaaataatttcattggaaatggcctcctttctttcaaatttctgatcatagattttgatcttcacatgttaacccctaattacagttcttaagttcaatctcgccagtataagtattcactggttgcttctttgaaagctgcacctaatcccaattgctcaaggactagcaaaaagaagcaatcaatacagcatgtgagttagagcataaaggaactgtctgggtggcagacttataaagcagacaaaactgcaggaggtgataacctagaccagttgaccaaagccaatgacaattagaggctaacatgtgaagatcaaaaagcaaatactaatttgattaattatcacaatatgactaattacaatttatataatacgaggagtttgaataatgaaaaatagaacaattacggttgaatgggaagatggagacttgaacgaccactgttttgaaatggatgtccctgaaaatgctgatgaagataccgtaaaccaacttgttgaatatagagtttgggctgaagctgtttattattgtagttggcatgaagggggcagcgatgatttataaaagaaaagctagaaaatcccacaaagtaggcctagagcatcgtatccagaatgacattatcaagatacttagacttaatcattgcaatgtaatgagagccaatgcaggaattatcaaaactcaaaatggtagtgtctttaagggaatggaaaatggaactcctgatttaattggttttagatggcaagacaaacaaatatttttcattgaagtgaaatctccaacaggacgtattagatctgatcaattggcttaccacagtgatctaatgcatcacaaggtgattcatggaattgctcgttcagtagatgatgcattaaagattgtaaacgaaggattaatcggttatggctatccagataccgataaaaaggagtggtattaatggagatggctgcaattatacttaaaattcttttgatcatcttatttatgggcttactggtgatgacttttcttatgtttggtgcagttgcctgtgacttatttaaaatcgttagaaatcgaaaatatggacgtaaacggaaggaagaaaaatgatatcaatttggttcttttacacaattttgccattagtgatgatgcttattgttttagccacagcatcaaataaaatttgggcatttatttcaattttgccgatctggattatagcagcggttattacttacttcttgctaccgtcgagaaatctgttgagtattctctggggtaatacgttttatgggatattttatttaacgttagcttctcaggcttatgacgatgatgacgatgctagttcaaagtttttaatggtgggcatccccgtcttagtgattttgttcttagtttgtataggcggctcattgcactcacacatgtctgttaagccaacatgggattctatatctaaagaatattcaaaaagcacagaagcgccaacattcaagcgcaatgaaactccaattgcattagcacctaaaacagttattaaccgtgttagaaaagcatcgtctgatattccaaacacgcaatattattcgatttctgatgaaattcaatcacagtactacaaaggcaagccagtttatgtgattccaattgaatataacggattttttcaaagcaatagagctggtgagattcctggctatttcatcattgatgctactagacaaaatgcaacaccaagatttgttaaaaagccttattactatgcagtaagtggttacttcaacaaagatgcatcacgtcaaatctatcgtcacaatcctagctggcttagcttagatactccacagcttgaaattgatgacaatggtgatccttattgggttcaaacagtttataagtcagaaccattcagtcatagagttaacttcagcagattgtatgtggctatcttaaatgcaagaaccggtgtcactaagacttattcagtgcacaacatgcctaaattcattgatgaaggtatcacaaccggtattgccgataagatcaacaacgattttggtaaatataagtatggtttctggaactggagcaagaccggcatcatgaagccaacaggaaatggcgttgagaatggtgtaacttcagtattcaacaaagatggttcaattagttacttcactgactttactactgatagaaccggtgccgattcagcattaggctacagcatgatcaatgcaagaactggcaagctcactttctatagaactaacaacattatggacagcgatggcgctaaaaataatgctgatcaagactacaaagctcaaaaatggcgtgctaatatgccaattctctataacgtaaataatcgtccaacttgggtaatgactatcctagattcaactcatgctattcgtggctattactacttagatgcaagcgatcaaagcatttatggaactggtagcaatccaacaaacgctctggattcatttagacaggctcttgttgattctggctcttcggcaggtaacacaccaggtgaaaagaagaaaaacttctctggcgtgattaatcgagctgcagttgtttccaacaataacaaggcaatgttcatgctgaagggcaaaaatatcattttcactgtgaatactaatgattatgattttgccaacttaattagacctggtgacaaggttaagttctcagcaaatgttgttaagggcaagtcaattggtaacgtcaatgaatttgaagatgaaagtttagattaaggggattatcagttgttagcacttggtgtaggagaaacaatcacggatggcgttcacatctatcgtttagaagacgatttgaaccttcatttctggaagttaggcagtaaagctgatcattacgtaagtacagcaggcttgaaattgcgcttggagattcatagtgaggataaaaatgaaaccaattgatcaattaaagtcagtcttagctgagagtggttatgatgtcatcaacgaagacggctataaaatgctagagaatgcaaaagttattatcaccgttgaacaagccaaggtcattgcacaattggttaaggacattgccgaagccaattacaatgccggttattataaaggtggtactgatcaagcgtttgaagatgggaagaaattaggagaaatactcaataagcaaaataaataatgatgtgatgtagattttaaagtttgaagagatacaggagtgggacagtgtttttatttgatttaccagacgaagttttaacagcagaaaatgtagatgattttctcagcagccagattaacagaatggaacggctcagtggggttagtttatctagtccccagctatcacttgctcccgctcactcaaatggcgttaatagccaagaaaagatgatggaaagaagactggcagcatttgatgttttgaaagcaatcaaatatgccattgatcatacatcaggtgtatctcctcagatactatttgaattttacgtcttacataagaaagtatgggaaatcaatcgtgactgtaatatgaatcataatcagttcggtgatttcaagaatgttgcattgaatcaatttgctgagtgttggatctcggcacaagacaagtattttcctgatgaagctgatcgttttgatttgcagatttatcctggtgaaactctagcagacgctggttggagagcagatcaaactacgcgaaaacgaaaaaatgggatgtaactgggatgaaagtgggatcataccgggatctgaaagggatttacttgggatttaatcgggattaagttgggatcgcccgatgatgaaaaaagcagataattgttattgtcgagaaagtagataggagatctacctcgaccgatgcgacggaaattcatttttaccaattagatctattctccttgtaaattagagtgacagcattgcatactatgtggcttgcaagttacctggttcgaatccagatgctgtcatagcctcagaaatactgaggctgaatcaatcttgttgttttttattgaatttgaacccgaagattcaacaaatgcttgagacaagataaatcatgtttcccgacgtgttgcagtggaatacctgcctcacgtcttagctctgcgatgaccgtaagcgagcggagcattgatataaaaaaggactattgagtccgtgttctgataacaaggttttcctaacctaaccgcctgaaaaggcggccacctgatctaagttcggcaacgtacatgttttctaaattgtggaggtgaaaatctccccttgatcatgttgctctgcatgtactgaaggtcggcacttcattagatcttagccagtagcaatactggttgtgctgataatcaatttaagcattaaaaaaatctctcacattcggtagtagttgttctgctaccatcttgggcagactcgtgtctgtccgttggcaagtcagagtcgcttataaatgcctctgttgaatttaattgactggcggacagttggggttcgattccctgactgctcattacgtggctccgctaatttaaaaatcaagaacaaaacatcgtaaacatagaagacaaggcaaaaatcatggaactaaaggaactaacaactagaactttgaagttatttaattcaaaaaatacaaaagaattaataaacaagcttccgagctattggaatgacgaacaagccaaacaaaaattttgtgatttagtatgtgatttaagtgttgactggcttcaaaaaatttttcagtactacgaagcagatagaaaagacaaaaagcaagattatacgcctacaacattagcaaaattgatggcaaatattgctttaagagacaacgaaaacagcattacagatatgtgcgctggaagtggtgctttaacaattcaatgttggaacttaaagcataatattcatgctgaatgcctagaatttgatgaaaatgtaatgccaatattgatctttaacttagcggttagaaatatagatgcaagtgtttatcaaatggatgttttgcaaaatgaagttaaacattcttggaaagtagttcctggtaataaatttggagaggtggtagcaaatgacaacgattagtaacccaccatacaacatgaaatggaagcatccattcttcgcaatgtctcaatcaagatttgcctttggtcttccaccagaaaataatgcgaattatgcgtttatccaaacagctttggataaaaatgataaagctgttcaggtcaacctttttattcatttcttgccgtatctgataaatcaattgcaatagctgacgtgaacgccgattaaaacgtgagtgtgataaacaattgaaacattcacagaatcttctttgtgattcaattcctgtcttagcttgccagataagtaaagccaaaatcagactgtccgtagttttaatttgatcaatatttcgccgatgagtaaactcagccggtgcatacaaacgataccagtgccgacaaattatcactaaatctttaaaactaacttgtaaatggtggctaaaacgcttaagcttaaggcagttcaatcagatcagactcttttctttttgatactacaacttgagtctagtccgattggacttttttattaactaaaacgatttaactagcaccacgcgtatgttagataattattttaataattagcaaaggatggaatgaaatgaagagaattagcaaagatgaaatgagtcagattgatcaagctatcaaagaaggcttatcagatgatgatcatagcactaagccagttgaagaagatcacgcaggagttccaggtaaaaaaggtgttttgttaataattaatgggctaaatcacggaaaaatgtgatttagcttttattttgctcatttttaaggaggtgtaaccagttttgagtaagaaaaaatcaaagaaaaagaagtcagtaactattccgagattaactcaaaagcaaaaagactttgcagatgaatatatcaagactggtaacgccactgaatcttacaaatcagcatataaagctgatcggatgaaggatgagaccatctatgtagaagcacttcgtaccctaaggttaccccaagttgctgattacatggacaaacgcatgaaacagatcgatgaagccaaaattccaaagcagaaagaggttttagagtttttaggtggagttatgcgtgggacattaaaaatcactgtagagactgatgatggcgttgaagagataccaccaaattggaagaatcggattgatgctgcaaaggagttactaaagagaatgccaattacagatgatccaatcacacaggctcaacttcgtaaactcaatgcagaggccaccttggctgaatcacgtactaatgaatcacaagacaagtccggtcgtatgcgtaagttaatatccaagaagtccgataagcaacttgaagaaatgattcaatctattgaaggcggtgatagcaagtgacagatacagcactactcgatgagtttaaaaagctaactgtcaatgaactaaaagatgaactggcttggcggtcatatcagaagtactttgaactcgtttacccagatatgacaatatacccacatacgaagtacatctgttcactgcttcaaaaaatcgcagatggtgagcaacatttttatataatttcatgtccgcctcaacacggaaaatcgcttaccatcaccaaaacctttccaagctattaccttatgaagcatcccgaaaagcacgttatggttactgcttactcacaagacttatacagtcagtttgcagaatcgaatagacggcttttttctttatggtctcaaagagtgccagatgctagtcatgccttacaggttggaaaaaacacggctcagcaattcaacattgttgatcatcgtggcggtttctatgcgacttcaatccttggtggtgccactggtatgagtgctgacctattaatcattgatgacccaatcaaaaacgcagaagaagccggatcacctacgatcaaggacaagatttggaatgaatggctacttacattcaaaccacgtttgcaaaaaggcggctctgtcatcgtaatcatgactagatggcaacaagatgacctagctggacggttactttctaattcaagttttaactgggaagagattaagctgccagcaattgctactggattaaaacctggtgaaactgatgtgcttggtcgtcataatggtgacccattgtgtcctgacttgcacagtttagatgaactattaggtaacaaacatgatatgggtactcaaaagttcactgcattgtatcaacagtctccaactatcgaatctggtaacatctttaaacgtgattgggttcggttttatgttcctgatcgtgcaacgatggcaaggctacatttaactgataaagacgtgaagatattgccgagacacttgcaagaaactgttcaaggctgggatgcaacatttaagagtaaggaaaacgacgattttgtagcaggtcaagtttggagcagacgtgatggagatttctacttgcgtccaggttggtgtcacaagagactcagctttacggaaacacttgacgcaattaggactatgactcgattttatccgcaggcaacggcgaagttagtcgaagataaagccaatgggccagctatcatagacacactgaaacacgaaattccaggtatcattgcagtttcacctggtgctgacagtaaggaagctcgtgcagcatctgtttctccactgtgggagtcgggcaatgtttatgttccgcatcccaaatggaagcgtgaagtcgaagactggttggaagaaatattctcattcccgaatgcaccgcatgacgataatgtcgatagtatggtctactgtttgcaacgcttgcacaaggccaagcgcagacctattggaattatcaagttttagaaaggagattacatgggtttatttaatcgaaaaaagcctagcaataagcgcagaccggctacagctaccagaatggacggctatcgtgaagattttatggactatgaatctcaattcactggtcagcctcaaagattcggtgatacacgaccggtttatacgccacttatggcagatcaagattatgagctgcttgacaatatcattcataaaaatggtattgctcgcaaagtagtcactaagcctgctcaggacgccacgaggaacggatggcgaatcatctatcctaacgatcctaaaaagcaggaacaatatcaaaaagctcttgatgcattaggccttaaaagatcactgtgtcaggaacttatttactactacgctcatggggatgcatacggaacaattggtatttattctcctatgcttgataacaatacagctaagccatttgatccaaagaaacaatcaatctctaatattgcgttcttccacgtatttggtcagaatcacgttcaaaagattgaagtaaatgatgatccaactgatatcaattacatgaaagaagctgcagtggttatcaatcaaaccaaatctggcgacacagttgatgctaatggcactattaagccaggcatcccgaaaacaaagcagattgtcattgataaatcacgttacttccacatctcactagacaagttcgaagacgatgacactggtaactcaatcattactaggtgttgggatcagattcatgtgctagacacagcgttgtattcagtaggtaagttgctatatgcgtatgacatcaacgtattaactgatgatggcgctggttatgatccagatgatccagttagcaaggcagaatttgatcagcaaaataaaatcttgtctcaaaacatgggaactgattcgattttgaatttgcataatggtcaaacattccagcgcttttcaaacaacgtctccggtattgaaaatctgctgacgtttgcttggcaacaattagcagctgcatcgaatattcctaagtcggttttgttgggagaacaagctggtactttggctggtgcgactactgatgttgcaaattactacgatggcgttaaatctttgcaagaagaactgctgagaccgcaattagaacgaattattgaactacttatgtggtcaactgatgttgcaggcggttcagaagaccctgacagcgttgattggaagcttgtttttaatccactttggagcgctgacgacaaaactcagtcagaaacattccaaaatacagcaaatgctgtggccacattggttaactcaggtattaaagatcctgatgaagctaaccaaatggttgatggtcaaaacaacaatgccgttcaagggatgcagactcaaactaaaggtgactctattgatcaaggcgtaacgatggaacaagcaaagcgattgatgactgaactgaagaaagtgatccacgacaatgagaagagttccgactagatacccaatgaaacttgaacagcaatacgctcgtaatctcaaaaagattgtttctgattgggatcgaggggctaaagcctgtgctcagttttatttaaaacagtacgtcaatggtggtactcaattgaaacttgatgatgctaccgatgatcctaattggaccgacaagcttaatcagcaaattgaactcatgggcttcagcatgcaacaagcttcaaagcgtcatgatgttaattcaattgctaccaagtttgttagatctctaaatgcttttagctacaacaacgtgaaagcacaagctgcaattgttggtcttgatccaatcagtgacaacaatgttttgcgcaattacgttaagggcaagattcaagagaatgtttcattgataaatagcatgtattcaacatattggcattcgctcgaaaaagacatttaccgctcgtttacttcgggtggcggtattacgagtatcaccgatgcaattactaaacgaaccggaatggctcgaaggcatgctgatttgattgctaacgaccaaaccggaacgatcatcagtcagttcaatgcttatcgtgctaagtctgcaggtgctgaaaagtacttgtggcggtcaatggaagacagacgtgtgcgtccaaaacatcgtgagttagatggcaagacgtttaagtatggtgatccgcacggtggggacgatggcgagttacctggtgaaccgattcgttgcaggtgcatcgctgagccgattttttaaaggagtgattttatgacagacgaaattaagaacacaaatgaaactaagcctgctggcttaacagaaattattaagcctccattaaaagcagatgctgatgccggtttgagcaagttaactgaaaagtcggcagaaccaaccaagccggtgactgctcctaagcctgaaccggtaaaggaggtgaaaccagtggcaaaagatccaaaaggaatgttcgattactcgaactgtaagcaatatgtagttcaacaaggcgacactttgcttgatgttgctcaaaagtttgtcgtagcacttcaacaattgcgctacttcaaccatttggacaaggaagatccagttatcagaccaggcaagacgctctatattcctgataagccaattaatgtgccatacggtgaataacaatgccgtccgtacaaagatatgactctgtgccgatccgtgattatcacttcgatgatcagaccagctttttgtatgtctacagagtgccaattgctggtgcaatggtgcaaaaatacgtcaaatctgacggatcagaggaaatggaagccaaacttcctgaagaaattctttcagattcaacggtttcaagcgccaactctaagccggtcacagacggacaccatgggttagttaccaaagataattctcatgacttgatgaaaggctttactgcctcaaatggccacgttgaaggcaacatgctttacaacgacattaccattactgatcctaatttgatttctcagattaagagcggtgacaagagagaattgtctattggctttgaaactcaaatggatccaactagtggtacttacaacggcacaaagtacgatgcagttcaaagaaatatcaggatcaaccacgttgcagttgtaccgaaaggtcgagccggtcatgaagttcgattgattggtgacagtgcagaagcggttgaacaagtagaaccttctgaagagaaaggaaaccaaatggaaacaagagtagttcgtgcagacggtcaaaacattaccgtagctgcagatgatgttgaaaaaattacaaagctcgatgctgataattcagctaaggcaaagcaaatcgctgacttagatgctcaaattaagaagttaaaagctgaaaaggcccaacttcaaggtaatgccgacgaagccaacaagaaagctgattcacttgaaaccgataatgagaagcttaaagagcaaatcaatcacttaaagggtgatgcatttgatgaacgcttgaacttaattgataaagttaagagctttgttggtgatagtgattatgactatcacggtaagactgaccgtgatttgaagatcgatgctgttaaggccatcaaaggtgactctattgactttgaagataagtctgatgcttatgttcaagctgcgtttgacatgttagaaaagccaaagcaagtttcaggctatgcaggtcctgatcctgaaaccaagggagatagccaagatgtagatttgatggctcttcgtgatgcatcatacggatattaattagaaaggagacacataatgccaatttcagatccaacattatattccaagagcgatatcggtcctggtagaattgctacccttgaaccatatcgtgtgaacgttgaaaccgcaggcgctgatattaagtttggtcaagccgttgttcttaaggacggtaaagcgattccagctacaaaggcacctgtttatggtgttgccctaaatcgtgattggactgattcagaaaacttcatccaaactgaaatggatcaagatcattactcagaaggtcaagcatttgatgttttacgtgatggtactgtatcagtcaacgttagcgatgatgtaaatagaggcgaaaatgccactgttgatgcagatggcaatttcaaggctgcaggcaccggtgatcaaatcgctggtgtctttttaagttctggtgataaaggcggaacagccagattacaagtcagaatccaattcagtcatgataatgctgacaacgacactaacaatcaaggcaagcaacctgaaaataatccaagtggttccgcaactgacactaagaagaataactagaaagggagaactaaatgcctaatactgcgttaatttcaaaacgtgaattggtaacaatcgacaaaaagatttactcacctaaaaagctcacactgaatggacgtaatttgtttcaaccaattcaatgtggtcaatatgatcaagcttatgcttacgatgtagttgaaaccagtggcgtagctaagagaagtggctcacgtaacaccgatactccagttggtgatgaaactaagcatcgttacttcactggatttacatcatttgaaactggtgttgaattttcagatgatgaaattggtcgtgcaagagccgttggtgatgatcaattccttaatagaaaaactgatcaagctgttagatcaatgtatgaatacgaaaataaggttatctttaatggtcaaccagaagattacatcgttggtttaactgaagaggctgataagactggatttgctcaatcaactcctactaagaagttggacaagatgactaacgacgagcttagaagatacttcaaggaagtttctcatcaaattactaatttacactttagtgatcaaaagccatgtcttctcattactgataaggtcgatgaccttctggataatccatacaatgaatattctgatgacactactagagacaagatcagcaagtacttctcatcaattgatcctattcctgaaatggctgctgaatacactggtcgtgatttggatatgggactttgcttcttaaacgataccgaaactggcggtattccatatgctgaaaagattaatcaaattcttaatcaacacttggatcgtcaaactaagattaaatatcgagaaatctttggtggcgttgtaattcgctacttgaaccacgttgtgcaacttaacgacttggtttctaagacagcttaggtaattaagatgattaccgtagatgaagttactccagaggttcttcgaacaatcggtagctcaatcgttggtattagcaaattgtctgatgatacgctcaatgcgttaatcaatcaggcaactctaattgcagaatcggatggaatgcctgaacaagttaaggttagagacaaaatcattcctgctttgaacatggccacacttaatatggctctccatttagttactgttttaggtaaatcagctcaaggcattttgtcagaaaagctcgacgttatggaacgtcactatgctgacgtaagcgaccgtggctggcttaattcctccaagtgggggcaattgtacatgtggctctatagaaaatatggagaaggtagtacaccaagaattgcggtgatcccacattgacagttacaactgaaggacatcgtccagattttatgaagatggccaaagaactcgacaagctaaaccattgggaagtagcagttggtttctttggtgaaaatgatgctaagttgctgacaattgttcgagctaatgaatatggagcaacgatcaaacctaagcctggcaataagtttggtggctatttgatggttccctacaaagatgagaatgataagcaacgcttttacaagttgaaagaagttgttattccaccacgtccatttatcaaaaatgcatgggaagctaataaaggcaagtacaagcaaatggtatttgatggactgaaggacatctgtaatggtgatatgactgcaatgaagtttcttaataagctgggagttacctgtgttaaggacattcaagaagaagcagttaagcttaaaaatccgccaaacgcaccattgactgttgaaaataaaggctcatctaatccgttggttgatactggcgaaatgattagaaaagtaacttataagattattccggactaggagggatgcaaaatggctttttacatggacgtttcagatatgattgctgatttcggtgaaaccagtgagatcaaagtatggagaccagatgacagcgccaatcaagcttacgttggtggtcctactgatgaaattgatttgtctgatgataaggcagaagtctgtcatgagccagttttgccgattaatcctaattctagtctagggagaaaaataactgccggaggcggacagctagaaggtaaattggtgtggtactcaactgaaaaatatccatcgggaacgattgtaaaagtacctgcgcagttgggatactacaaggtaaccacatacggtatttggaatccatattccgagttttacgagtatgtactagaaggagatggccaacatggcattgaagaataattatcgaccagagctgaaagacagctatctggtcgtttttgttttggccaaggtggttgatcatctttttaattgcaagctcgtaccgttcaataatccaggtaatgcaccggattatccttatgttacctaccatccaattattccgctcgactacacgactgcagatcatcgtacggatcaatactacgagcagttacaaattgattgtcatgctactgatcctaatatggctcagcaaatggctaccgatctgcttaatgggttggttcacgacacaaattatgagcgatggtttgatcaagtcaatgtagttcctgcagcattaccaaatcaaggtacaaaaatacaagaccatacatcaacgttgttgggccctaactacgacaatatgtatggtttttattttaacttcctgattagtaaagcaggtactgtctatcaagcagacaagttgaagtttgaaatcgaagattacactatcgattcaattcgggcaaacagcaaagttgatggagatcaaattgattctaagaaggaggaaacttaatgccacaaaaaattggctcaaacgttgttgcacctttcgaacgtgtaaaagatgtcaacgttattatgacgatcttgcatcctcaaccacttgttggcttaggtaatctacttttgattaacaaggtagataagccagccactttaaagaaaactgcagctcctgcagttactcctgccgttgctggtgctggtactggtgctggtactggtgctggtactggtactggtactagtggcggcactacgcctaaggatgctcaagacaataaagataagactgatcaaggctctagcactactggtgatagagccttttctaatgaattgagtaacgacgacagaatgaacggcttgttgaagcgcaaggtcgatacagccactggtgccgtttaccgtgaatacaagaacttagatgccgttgctgttgactatccagaaaattcacctgtttggttcaaggcaaactcatactttgcacaagctaaccactcagacagaattgccattctggattatgtggacggtaagttgctcgatacattgaaggacttctggtattacaactggactttcatggcatttgtcgacaacacaatcaatgacgatgttattttggcttctaacatttgtgaatccaaccaagatcacttccttgtacttcaaagcaatgacttggctcaattcacacaattctatggtcaaaattacactatcggcttaaagcatgacctttcagaagctatggacactgctcttgttggtgctgtggctacaaagactgttggttcatgtacttggaagtttaaggaactcgaaggtattactcctgaagaccttactactcaagaaagagccggtatcgaaaattctcactgtattgcatatatccaagttgatggacgtaacgaaactgctgaaggcttctcaatgtcaggtgaatacatcgacttattgcacggagaaatctgggtaaaagtcaatgtcggcaacgaattgcaaagacttttgcaagaaaacgacaaggttccatatgacgcaactggtatcagcatggtttcagcaagaatcaactacgttcttgatcttgcctggaagcaaggcatcatccaaaccaatgacgacactagcaagggtatgtacgaagttacaaccactcctcgtagtgcacaatctcgtgatgatttgtctaagcgtcactatggcggagcttcatttacctaccatgcaagctctgcgatccatagcttgacgatccacggaacagttaattcagacacgattatgcaataaaaggagaatgacatatggctaatattaactcaccaatgactggctttatggccaagtacaatgccaacgactgtgtcctccaaattggtggcaaagtcatctctgggtttggtgaagacaccatgattactgtttctcgtgatcaagaccgtgccaatatcactcaagacccacaaggtactggtattttgtcagttaacaacaaagatttgtctactattactgttaacatcagtgaagtatcaccagatgctaaatacctcagtgatttgtgcgaaaacttgaacgaatttccaatcgatttacgtacaactactttccactactggggttcttactgcttggttatcaaggatccagactactcagttggtgcacaagcttccaacttaccctttcaaatcaaggcagttaacttaaacaaggaatctgttcgttagaacagtttcatcgagattcgtatgcgattttagataggagaatttaatatgtcagaagaaattaagaatcaagaaaaccaagaagaaactgaagctactgaaactaatcaagaggcttcaacccaaccaactcaagaagaaatggctgctaacactaagaagatcatggacgatcgtcaaatgatcctcaagttggcagaatcaagtaagattgctgatactttcggcaagaagaagatcgtctttatcgataatgatcgagcaactaagtatgctcttgaattaacttatcctggttcagtccgtgcttccgacattatccaaaagagttacatgaccaatggccaatatagtttcagcactctaatgcaagaagcaatcaaggatgtaattacattgccacacatcactgacttggacttctggaatcaccatacgaattttggtgaagctgctgtaaaggtgtttgactttcttaacgatacatcttcagccccagatgaagcctcaggagatcaagaatagggctgaccaattagaacgaattgtccggctggtcatgcatggtgtccctgagcaatgggtagatcgtgcgactgaagatcaattggaaattctctgggagatttacatccgggatcagaaagacaagtttgaaattacatcaaatgccaatgctaatggtattggtattgcctttggtggcaaaaattagggaaggtgaggcttatcgaattaatcgatggcttttttattttgtcttaaagccaaaaactagataggaaggatataagatggcagcagatcacgaaggttggtatcttaaggcaaatgttgatatatcgagtttgcttcaagccaacaaggctactgatgaactttttaagaacataaagaaagttgatgccggtttttcgggacttcatggcaacgatgctctagctaagagtattaaatccgctgatatcgagactgcatcttatattgatcgtcttaaaagtgaaggcaagacttacgaagccaatgagcagaaggtaaatctgtattcgaatcagattacaaggcttaagaatcgtcaacaaggattagtttccgagcttggcaagattgctgaaaaatctggtaaaaacagtgatgcattccacatccaaaaagccagaatcaatgaaaccacagcatctatcaacaagttaaatgatgaagttaacaaattgcatccaactggattcgatcgcttaacttcaagcattaacaaagccgaaagagctagtggcaaaatcaaagacactttacgaagtggctgggacaatatcaaaggtggtgcttatagtactgctgctggtattgcagcagttggtgcagccgctatttctggtgctaaaaaagctggaaatcttcagcagacctacaaagaaattgataacctagctgtcttaagcggtgaacaccaaagatcagttactaagtcaattgctgaaatgcaacgccaaggccgagacatggccatcaagtacggtaaatctcaacaagagattgccgaagggtatgaagaccttgtcaaaagaggttacagtaccaagcaagcattaggtgctttgagaacggaactgcaagcctcagtggcgagtggtgataagtttagcgacgtaaccactgtcagttcacaggtaatcgaagcctttggcatgagagccaagactactaaagacatgatcgaaagcactaataaagcagtaaatatgctggcttatagtgcggatgctacttcaactggtttccattcattaggtgattcagttcactactttggtgccgctgcgaaagcgcagcatatctcacttgcagaatctgccagtgcggttggtgtgctcagcaacaacggcattgaaggctcaatgggtggtactgccatgcgtgacatcatcgaacgtattggtagtcaggtaaacggcataggtaaaaagaacagtgtatttactaagctaggtatcagtaccaaggaaattgaagacagccaaggccacttgaagagcttagctgatgctatggacgtgatctggaatcacatcaagcaacacagtcaaaactcaatccaagaacaaggctttatgaaatcgatttttggatcaactgcacaaaacgcagcgactattttggctcagaacactagtgaacttagaaaactaactgaggaaactcaaaaagtcggtgataagagtacctatgtatctaagttagctgctaaaaactctgatactgcaaagatgcaagtggctagagctaagcaggccatgaatgacttcgaaattaacttaggtgcaaagctattgcctgctatcaatgatgcaggtgaagcattagctaagtttttgacttcaagcgatggcaagaagttcgaaaatgatacagctaatgtaattaagaactttgctaatactttgattggcttggctagatttgttactcggcatccaactgccatgaaaattattggtggtgatttcttagctggatatagtgctgctaagattgctaaaactattagtttcattggtgaattgaagagtaacttcaaggaactagctgaaactagtccaaaaattgccaacttaggcaaggcaacatctcaattaaccaaacctaccaaatggtctaagatgactggtactgctaagttaacaacgactgttgcggtagcattcgatgcctaccagattggtaatgatttttataaagcaattactgctaagaatgttaataccaaatacgctaagtatggcgctggtattggtggcttagttggtggcgctattggtgcatcattaggtggtgttgctggcgcacaaattggtcttcaacttggtcaagcaatgggaccggcagctgcagcaagctttatgaagggattcaatgcaggagttgatcctaaaaatgcaatcaagcaaaaagtaaagctaaaaaatggtaaaacagtcactctcccaagggattctaattctaaatgggttaatgaccatggaactattcgacgagtcgacatacgtaatgcaggagaaagaaaatctcattctgatcactcagcgtacaacgtagagagccacttcttgcatcctacagatctcggtgactttttaggtgcatcatacaagggcctttggaatgatattacacatatcggtgatcttgactactttaagagagatagaggtgctcgccgtcagcaagcacgaggatcttggctaggaaatgttgttaaatacgttagatccaatcagatgctcagtccacacggtaagcctagtgatggaatggatggaactagaagcctattccgtgatataggcaagtgggcaggtaagcaaaactgggactggggcgactttgaccctcagaaaaatggatttaatcactggcttgctggtttcacgcctcaagttcatggtaaaaaaccgaaaaatagtcaacttaagcttgaagcatcaggtattttacctaaagtaaatgccaaaaaatgggctactggaattattgatgatgctaaaaaaggcatgaaaggttttcctatatggaccaagaatttaggacataagtctaataaatggttcaaagacaagtggtcagggatgcaacactggggtagtcagactaaaagcaaggctcaaaaaggttggcatggttttgaagattggactggaagattagggcataggtctagcaagtggttcaaatctaaatggcgaggcatggaagcctggggcggtaggactaagaaaaacgctcaaagcgggcttcacggcttcgaaacttggtctggtcaaatgagtggacgggccaacaagtggttcaagaataaatggaatgggatgcagcactgggctggtggcatcaagaaagatgtcaactcaggttggactggctttgaaaccggcttaggtcgaatagctggtcgagcagtagcattcttcaagaaaccatttgagggcttggcgtcttggttccatgaccatgttcaaaagccccttggtgcctttggcggtaacgtggataagttctttcatggcaagctaaaagttggtaatctgcacttagctactggtactaattggaaatctaaatatggaattcctgctgtacttaacgacggctttgatagcccgcaaaccggcaaccgtgaaagcatcattcacagaaatggtcaaattgagttattgcctaacaagcgtaacttgaagagaacacttttacctggcgaagatgtcatcaatgctaaagacacagctcgattagctaacagattgcattttgcttctggaacggttggcttagctaataatactaaggctgcaagcaccgactataagaagttgactgctaatgctactaagtcactaactcagcttgataaaaccagcagaacaaagtggcgtggcattactactaacacaactaagcaaagcacaaaaactagaaagggcgtagtcactgattacactaaaatgcgtagttctgttaataaacagatgactaatatgcacagcggtgtaatcaaaacagcagcaagtacttccaaaggctttggcaaggcaatggataagatgcccggttatgccaaagatgcaatgggagataccatcgatcaacttaaccgtggtattcacggtattgacaaagttatcggtgaatttggcggtgatgcatcagcaattaaaccggttcactttgctactggttcaaatggtgcgttgacacacaacacgttggcgatggtcaatgatgctcctactggcccacgtcaggaatctatcgttcgcggcaataacttgatcattccatccggtaaagatcgagttttaccacttcaaaaaggtgataaggtccttaacggtcatcaaactgaagaaatggcccattcaatgggacttcagcactttgctaaaggttccggtgttggtcatgctgaacttaagcgactttatggaattgccaaacagaactggaaacaacctgaaagaaccggtcgcgcaatgtttaagccggtcagtggtttacaggctggcgcaaaggtcttagctgactcagcaaataaaaccggtgtagatcaaggtgtaaagtactggtcatcactttggggcttagctcaaaagaaagttgatgacagtggcggtgaaactggtcctgttagtggcttgcttaaggcggttgaacgttacggcgaaggccataagtatgttgggggtgcgactggtccatcgacatttgactgttctggtttggtcatgtatgcactgaagcacgcttatggaatcgattatccgcacttttcaggtgctcagtattcaagaactcagcatatctccaagagtgacgctcgtatgggcgacctggtattttggggatccggtggttctgagcacgttggcgtctatgctggaggtaacaggtattttagtgcggaatctccagctcaggctattcatatgaatactttgagctccgttgttggcaaaggcagtccactgtttggccgtgtcaaaggtgctaatactgaaggcacggcaagcaaaggcaaagttagcgttaaagccagcagttcacttgatagattcgtcaagaactcagtaggtccaggtttctggaagactatgcagaagattggtgatgaatttggtgaaggtggcggttacggtaatcctgctggcgatggtgtagcaagatggcgtaagtacatcgtaagagctgctcatcaaatgcacactagtgtcagtcctgacgaaatctctaagattatgtccatgatttctgctgaatctagtggcaatccaaccattactcagcaaattcaggacgtaaacagtgcagctggtgatccggctcaaggtttgcttcaatttataccaccaaccttcaacgcttatgcagttaaaggccatagaaacattaaaaacggctatgaccaattacttgccctgtttaacgaccgcaattggagatcagatatccactatggtggtggatggggcccaagtggtggtcgaaggtttgccaaaggaggaacgcatcacggaagtggtgcgtttttagttggcgaaaaaggtccggaaattatgcatgtccctggtgatgtttcgattgatgactaccagacaagcaagcgtaagatcaaggactttgctagagacattaaaccagtcaaggctaatgttcctggcagcagtcaacgtccgccaatcaatatcaacatcaactttaacggtagtgtaggtaactcaaaggccgacgaagaacgagttgctcaaattgtacaagttaaattggttgaagttcttgaaagatactttggtcatgaatttggttctgatccatctatctcgtagaaaggaggttaaattggtagcaaaaaagaaagagccgactgctcttcaaaaagccaagaaaaaagttgctactttaaaaaagcaacaacagaaagtcaaaaaagctattgatcatgcacttggtaagtcaaatggttactggattattgcacaagaaggtcctagaaataaaagaactcacgcacgtgcgatgaaaaagaagtgggacaaaactctttcggctaatcgaaataagttgaaaaagatcaacacggcttatagcaaagctaatgatcaatataaacgcttgaaaggctatcaggataacaagaaagctgtggctagcaagatagcagagcacatgaaatctcatcaaaatgagggtaattgtgccatctatcgtacagatggacattcagctaatgttatctatatttcaccgaataccggtgaatctgaaacttcaagcgtcaatattacttcttactcagtggacaaaggctctccacgttccaactatgcaagaacaagttcagaaactaaaagtgtttcaggtcttgtaactggtaaagacagagcggaagccaactccaaatataagcagttggagtactggcgtgatcatcataccgatttaacctacgaaggagatttcaagcagtcacacttgttgattgctgaattaggtcagaacttcactgacttgcgtgacaatttgcaagtaactttaacgtttcaacatgttagagctgcagaaattactacttcaactggtaataattccaaaactaagaaatcaaaatcaacaaaaactacagcaggtagccgaaacaaacgctacactgctatcactattaagccgggcgatacgttgctcggcttatctcgtaaatacggtagatcggtagcatggctacaaaaggtaaatcacatcaaaaatcctaacaagatttatgccggtcgctctctttatgtgagtgagaagcagaaaaagatcaataagaaagtgcgggtgaaatagatgcgcagatatgttccagtagatattcaagatataccggatatttttgatatcaggctggccggtgaagtttatacattccgcattgactataacgatattgcagactattacaccgttactatctgggatgttgatggcaacttgctgctgacacaacagcctttaattttaggtgaattagttggctatgatctgccagatgcacgtcttcctcgtatcgacttacaagtgatggatgaaactgatcaagctactgatgccggaaaagccgtatttggctatacagttcagatataccttgatgtcattgatccattggggtctgaaacaggtgatccaacaattgaaccacttggttacgatccagatgagccgacagacgattatacagatgaggaagtgtccagctaatggcatgggttactaagaatcctcatacttgggtagtcattgaagatcaaaaatcaggtaaaaaattagagatttataatgatgaaacccctaatcacgattttacgattccttttgaagttaattttagtgatgctgctaccccggcagttaataccgtaactttttacaatatctcaaaagcacatgctgattttccaaaaaaagggatgaaaatttatctgtattttaattggggatctagtaaaaagctgatttgtgagggttttatcactaaagttgatagtactcagcatgatggtgttactgattcaaaagttctttcgtttacagaagggactaattacagcaatgttaaggctaaccggttgaaagttgaaaaaagcaaaacggtacataaaagcaaaattatcaaagttactaaagacggtcactatgaaaataagcgtgtgagtgtaccgtcagttgaaacttataagcgagggccgcataaaggagaaaaacatactgtaaatcattggcatacaaagcaagtctgggtgccggctaaaactgaaaataggcgagtgccatatagagaaactaaaacatctagatctaataagacttacaaaaagggcacaacttatagagtgctgattcaaggaattgctaatcaatgtggaattaagattgatcgtattcaattgcacaaaaatccaaaactgacgcgaccttacacggctaaaggcaagcctttgacattaatcaaacaattagtccaaaaaacaggatcaataatcaattaccgcaaaggcaagtttgaaatcattgatcctaaagccgaaaagcgtacttggattgatattgatgatcaggatttagtccaaccgcctagcaataatgaagccgataatggcaaagaaacttgggaagttacaactcctttgattcctgatattactgttggtgttggcatcaatatgaagtctaagtacttaaaaggtcggttttatgtcaaagctggtcagcacacgagtgatggtgaaaacccacaaactaaatgctcattagctgcaatgtaggaggattgaaatggctaaaaataatcgggcatcacaagctgaattgcaaacagcaggatatgatgcaattagaaattttagacacgctatttttgctgaaaccgaagtcagcaatcttgcaagagttataagatatgatcacaaaaatcatttagctgatatccagccactcgcaaacatgagtgacggtagtgagtcagctcaatatttggatgttccggtcgtagagaattgctacattatcgatgaaatgattgatgcgttgaaatccgaatttggaaaagtagatgaaaatagcaagcttccggaacatgcagctacatcatttgtggccaaactgcctaaaaaacgattgctccgtcctggagtagttgtcgtgtatgtggtcttagatcgcgacagtgataattggaacagagatgcaacaacttttactccaggtagtactcgtatgcatgatgctaatgatgcagtaattattggaatttggggcggtgattggagaaatggctaaagattttaaatcaaccgagtatggtgacttatacgttgatcctcttactcatgattttgttctggtaagtggtctggaagaaatcgcacaacgaatccaagctacccttgaaactttttatggtgagatggatgtgctcgatccggaacaaggtatggattacacgaatttccttggtaaaaggtttgaaaaagcacgggcttctgacgaattaagagacacgatcaagcgacaagttccggaggttgattccgttgaagacatccactttaatttcaagccaaatcggagactagaaatcacttttagggctatggccacaccaactgaaagtgataactcacaagaagtagaaggaggtgttgagattggcgtataactcgcagtggggactaacatcaactggtttttatgtcccgacttatcaagaaatattaagtcagatcgaagatacaatgatatctttaattgatcctgacttagtaatgacaagtaattctaatgccggaatcctagctagactttttgcaagacgcgaaaaagcggcatgggaacagcaacaattgacatattattcagcatttatttctactgccaccggtgctagtttggactacatcggtggcaatttaggtttaaaacgtaaagtagacgaaccgtcttttgctcaaattaagatcactacgcaaggagaatacttaatccaagctggtgaacagtatgagacagaagacggttatttgtttactctgttgaaagacgttttgactaaaaaacaagaagatggctcttggagcggtactggttgggtacagtgtgaggaaactggccaagaaacgaatgtcccagctaactcaattactgttgaagctaatcctgatgatgaaattatctcggtcactaatcctgaaaaggcaggtggtggccaagacttagaaaccgacgatgtttatcgagaacgattgcgcatggaaaatgcggctcgtcctggatcaacggctgcaggtattagatcagcactgatgaatttgcccggtgttcgtgaagttaacatcgtgcagaatccttttgtagaagctgataagtatggcaatcctccttattccgtgcacatttactgtttaggcggtagcaagcaggatgttgcggattgcttagctgattacattgcagcaggtatcacgatggttggccgtcaggaattgatggttaaagatgcaacgggtaatccattaaagattaactttgattttgctactgagaaatcaatctatgccaaggttgttatcaatacgactgatgcatggaacattgatcagggtgcagatgatatcaaatactcagttgcagattacattaatgaactgcagatgggtgatcctctttacataactaggctatatggccctgtctatgcaattgagggtgttgatgatgcatcaatcacgatcggtactgaacctgacaagctgacaaatgctgacgttaagcaaaaagacttcgaagttgctatttgtgatccagagaatgtagaggtggtggtaaatgacttatgagacaacagatcagctgttaactcttccgtctcatcactggtataaggagcacgatggcaacctttataagttgcttaatgtttttaacggtgacctggaacgtatcagtgattccggtgccaaggtagcaaagtggcgtggtatttttgatgctgaaggtacaacgcttgacctgtttggtaaagatatcagtacttatagaccgacaaagagtgatcctccttatcggtttttaatttacctgaaaactcttctggctcgtgcacaaggaacaataccaagtatcgttaagatcactggtgaagcccttggaacaaggcaaggtcttaaaatttggaagacgggcccaccaagacacatagcaatccagattccatgggactatgtatcagaattgccagtcgagaagtttttgcttgaaaatctacagcacatgcttgcacttgggtattggcttgactacatcgtttttcatgccgatacaccacttaagctctatatcggagtaggcacccaagacaggtggcaaactactgctagatcaaaaacaatttggtggacaggttggaagtccaggacatcaactaatctctattacgggatgcacactagttataggcattatcaacgtgttaaatctagtgtgtcatggtggactggctggaaagctcaaacatctaagcatctatatctagcagtgattggaaggattgcagatacgtcaatttggcatacatcagcaagctggtcaagcaatcataaggaagaagtacacgctgggttaagcgttggaacaaaaacaataacgacaactactcaatcaatcaagactgagtagtttttttatagaaaggagtaaatgatggcagcagatacatcaaattcgggatttgttgaaaaactaaagcaatcgctcttgacaaatgacgggcgacatctgtttttggctgttggtgatggtactggcacactagtttatacaagagctatcttatcaagtcaaaagttaacggatcaatcaggtcaagcacttagcgatgaagcaataaggaatctaacaagtcttaaagatgacttaaaagaagggcaattgcagattactcccgtcgttgataacaactttgcggttatagctaactttgaaaacaggaatcaacaacaggatattaactttagctcaattggttggtatgcgcgtgttgatacaacaaatgctggaaagactgtacaaggcgaagagaagttaattgctatcacaccgactacacaggaccatgaagttttggccgctggaagtccagatcatcaatcaacccaagtcatttcagcgcagctaaacatgacaattagtaatgcagcacacattgacatgacagttaatgaaattggctatgttactagggctgagttaaacgaatggcaatcaaaagtacaaggaacaattgatactgagttaaagcaaggtactagcaagctaactatcatgctgaacggcaaggatgctactaaggcagatagcgacggtacttttaacatcccaacctatgattcagcaactattgatcaaatggtagctggtgcgggtaaaggtgctggtattaatacggtacagggggtagctcctgacagcactggtaatgttaatttatctggtgtcttttatctgaaggaagatgttgacagagcaattaacgatttaaaacaaacaattacatctctacaatctgcaaacaatactaaagaccagcaaattagagatttaaataatcagattacaggtcttaacaatcaacaaggtgtaagcactaagcagtataacgacttgctaaatcgtgtgattttccttgaacaaaattctgtaatcggcaagagattcccagctagtcaagaaacagaagcggaatcatgggagaaccaacaccctaactacttagcaatgattgaaaagtaagggggaggtgattaagtgagtacaattagagatcctgcttatataacaaatgctggtcgtactatgatgactgctggcggtgaggttacttatactaaggcggtcttatatggtcaagacatcagcggtttaagtgattcacagattaaagctttgacttcgctaggtaatccacttcgtgaggttaaaatcggtgttagcgacaagcaaagcactgacagcggcagcactgtaattcttgaagcagtcttccagaataatgacttaaaggcagaccttgaatacaaggcagtcggcttttttgctagaaagaatgatatagaacaactagttttagttgccgtcgccaatcaaggtgcatatctagcagctacaaatccagatggagttgctacagatgcgctaaatttaaaaattgcggtaaaaatcggtgatgctactagtgtcactgctgttgttgacccagctggctcggtaactcctgcaactcttaacagtgcaatcagacaagctacacaagagttgactgcaaagattgatacaaagtcaaacagtcaagatgtgcaaaatgcgcttaatctgaaggcagataaaagcactgtagaggattctttagcaactaaggctaatgttactgacttaaacaatttaagctcagaagtagatcaaaaagctaatagtggtgatgttgacaagttaattaatacagtttccgacactgtaaccaaaaataaagatgcaattgacaaacaaattgcatctttaactactactgttaactctaaagtagatgcatcatatagctactcgcgtgaggagttagataaaaaattacttgctttgtctgttaacacagatggcaagatgagcgcagagcaagtaactagcatgattgctaccaaagcggataaatcttatgtcgatgaacaactcaatgagaaagctgacaaatcaagtgtcgatactaagattaatgctattgatttcagcaaaattggatttactaagcagtacttaacaaattcaaatggtgatacagatcatcatacttggtttgcaaaaaagcaaagtgatggtacttggacaattgatattactgatgcaagtaactctggtgattggacagctgcaattgctagaaataataagcgtgatattgctagcttacagagtaacaaggctgatacttcaactgttaatgccaaaattgatgaagcaaagaacattgcaaaagctgatacagatagcttaaaaaatttagttaatgctattagaaatttcgatgttgctagctttaaaggtagtattcctaatactgatataaataaaattacagacaatggactatatggcttttccaatcaagtattaacaaattcgccttttagtggcaatacttggggattattgcttgtcattcgtgagtactacaatgatgctaacaatattgatcagtttattacttcaaatggtcaattatactggcgaaatatttcattaactaataatagatattctagctggaaaaagtttgctagtgacgatgatattaattcattacaaactcaaattaatgatcgtgcaactaacagtaaagttaacgtagcaacaacgctgttcagagagatcactaactcaaacacttggaacgacatctttggtgttaataatcctaacaatgttttgacttcactaagaattgacggtggcggttctggcccattgcttaacaattattcggctggtatcggctttggtggtcaagatactaaaggcgtgctaactgttgattacggcgatcacaatgcacgtatcacaggcggtaacagcgacagaccacagtggagcgaagatattgcttggaaaacagacatcacaagtttacgcaatctgataaatcagcaagcgcaaacgattcagtcgctgacagctagattaaccacggcagaaagcaagatacagtatatgcaagacaactatatcgaaggtaagagattcccagcatcgcaagaagcacaagcagaagcttgggaaaacgagaaacctacaagacttgcaatgattgaaaaatagatagaaaggagcggaaacatgctagatcatatgctttttaatttgaaaaagtggtttgcaattgatgacaatgcgaacagcgtagtagcgaacagtaggacttggtatgcgtgtcctaataaatttacagttccagcaggtatgaatattgacaaccctaatacgggtagtttctgggtagttgcggaagataccacagtttcatgtgttggagctggaaaagataaatacttctttgagggcacacttaacttaaaattcacggatagtggtacaacgcaaccagcaacttattcaactacctatgaaactggtgtcgcaccaaaaagtattgttaaaaatataatctgggggggggtaaaacctcaccaagccacttctggcaacgttttaggttacttctttgctcacgtaaggaggtggcttaaatgctagatcacatgttatttaataagttgaaatggtttaatattgcggataatacaaccacaattcaagcaaacggtaaaaactggcgagcttaccctcaaactattactgttgatggaaacaccaactttactattgcaagaggtgaagggcaaattcaacatgatggaccagataatacatacacatgtttgggaagctttgatggctactatgtagtcaatggtcatgccggcgaaattgaggggcgttatggtcttctactagttcctgaaaattatgttgcttccgtaaattgggggggtaaaaacctccctattcgcttgtatcaggcatttaagtcacttgccggaaaggtggtggctctatgattgattacatgaagcttaacaaagaaaattactaccctattagcaacagcgatgtaacagttaatgctaatggtaagacttaccgagactataaatatcaaacaattgctaaaactttatcaggtaatgatttacaggttatatctaatcataataatgatttctttgtggctgacatttctgttttggatatgaacagaaaaactaaatttacttttagtaatggagacagctttattattactaattatttgatgtatgccatcgcagataaaaacaattatttggacaatacaactagaaataattatcaaatcaagttttatccacaagtaaatatgattgaagcatattactatgatggtacaaatgatgtaagacaactagattgggtaaaaatagaaattaatgtagattagcactcaatgagtgctttttttatacaaaataaaccttgctcacggggcgttcccgtgggctttttatatagaaaggagccaattatggctgacgaaacacaagttgcaccagtagcaagtgctgaaactgctacacaagaaaaaccaactaagttgtacgtttattactactcaaatccagatggagcaactaaggatgaaagatgccatgaaatcttgaccgaagtcccatttgacgttgtgccttggagaatgcacaaggaagcacctgatgcaagcatgagtgaccctgtatgggataacaacttgaatggtggtcttggtgcatggaaagaaaacagcggtgaagcacaaggtcaaatccttgcagaagcacaagctaagatcgaagaattggatcaaaagagtgaacaacttgaccaagcaaacgccaaggttgaccaagccatgaagaccattcaaaccgctcaacagaataatactgaacaaaacgaaatgttgactaagggcatggctgcgcttatgaagagtcaaaaagacaacaacaagttgatgatgagcatgcaaaaagttatggaaaaccttgcaaagcaaaacaaagatgtaactacaccagaagcaccagctactgatacatcaacccaatcaactaataagcaagaaaatggaggtaactagttatgatgactattgaagaaatgtttatggatttgtgggtaatggattatgaacttggcttagcacacgcggactatttccaaggcaaggtacaaagtggcgaactttcactagctggctacaagaagatcgtaggtgaagattatgttgcgccaactcagcaagctgtacaatcaggtcaagaataataatctttacctaattatcggtacattaatctttttaaaaggactgggcttttgccttaatcgtaaatttttcttctacccgccgcaatttgcatggttgatgaataacgtttttcttgattattctatgatgattgcaggtattggactgctagtgtatgtctgccttccgtcaaacaacaattttgtccttggagttttgttggcgattatcacagtactgctagcaattatcacttgtattgagattgagcacgttatttttgccggtgagatcgaatttgtacaaaatgcgatttctaattccgtgattataggatttatcctctggactgctagacattactcaaaacgataggggtgatacaaaagtgcatatagatgtatcaaacattatcagcgctcttgtatcactagttttgggctattttgcttttagtcaaaacggcaaaaaaagtgatttagatgaaacgaaagaatctcacgattatattcaggaacagaatgatcgtttgaatagcgagaataagagattagtaaaagaaaacgaaagacttaaaaaggagttgaataagaaatgaatgatttttgggctacatttttagttaagtgtgttgggttgctactaggttttgtatttactggcgtagtaggctatttttctaagcaccacatcaaaatcaagttacaaggtcaagaaattgatgctacacaagccattcaaactgctattgaattagcggttaagtggggcattcacagcgccgacactaatcaaagttggtcaagtcaagacaaggaaaaatatgtcgagaacttagctgtccacttccttgaaactttaccagtgcctgttaaagatgctgacaagtatcgtcctgaaattcgggcttgtattgaagcaactttagctggcgttaagttagctaagagtgaagcgaatgcggccaatgctacacaacctatgcctgaaccagctaaggtagatggtaatattgaagctgtaaccgatgaaaagcctgctactgatacaaagggtgataaataatgactctaaatattgttgatttatccagcaataatggccctgtaaatctcgctactttaaaacatgcaggctgtgatggcgtgattatcaaagctaccgagtcaaactattacgttaatccttactttgctggacaggtaaagcaagctgcacgactaggcatgctgattggtgcatatcactactcagatggtggcagcgtatcagcaaacattaaccattattggaatacagttaagccttacgctaagtacattgacttgcacattctcgattatgagggacgcaatattgttcgtggcagtgttggtcatgctagtgctgcattagctatgcttaaaaagctaacaggaaagacacctatgatttacatgggcttatctgatgaaaattcttataactggtcaagtgtgactgcctatccattatgggtagcacaatacaatgacatgaacaatcattatggatttcatccacgttcactgtatggaagtttgcgtcactggaagaatatggcgatgttccagtacagtgctacgtcttacattggcggtattggccaagttgatgtgtctgtttactatggtagcaagttgagttttagcaacaaaggaagtgttgaaatggcagaacattggaaagcgccggttgagtttgatgacttgggtgcttttaaagtaatgcaaaaagaagctacattttggaatgatgccaacaatgataaaaaagttggcacaactaacgctggcaaaatttaccgcattacaaaggaaaagaatggcttttacaagattgcaaatcatgatatgtggctagatggtagaacaggagacttccatgccaatcctgttgcctatagtgacaaaattcatgccaaaatcgtagttgtaaagccaacgtcaggtcataaagacctaactactaaggtagtgggcaaaactttcaaagttgggtcaacttggaagatgttcggctataagacttttaaatctgcgtcaggtactacatggcattgggcacaggttggagcaggagataacaagtacatcaacttagataagtgccgtgtacttgtttaagtaattaatatattggacaaaagagccactcgaggagaaatcctcgggtggctcttttttgcgttgttagaagaaaaattacacttatggatagatatttacgatgagctataatttatccgtaattttatccatatattatgattatgccactttgggtagtgcgctatgttataatttgatttatcaggcgaatagagcctttatctgtatctttcaagcttctatgcagataaataataatgaagcaaagtaaaacatgttttaaaagccactccagaacgcaagtctagagtggcttttttacttttttgaaattaattattgcatttatcccgataacgtgataatataataaatgaaggaggtgataagcttggcgcggagaaaaattcctaagaagtttcggaaaaaacttcgaaagaaaaaaagccctaaggctactccgttagaagtgactgcagcaattgcaacaattatttcggcagtcgttgaattgctcagctatttccacattagaccttaaagctataaggagccgaaaggctccttttagcctattataaattagttaggagagaaaatctatgagtaaacgtttagcatggacaattgttttaatttgttcagcattaatagtgttgctaaaagtcttaacatacttaggagttagaccatgaagataaatcttaatagtgatgatatcttggaagcaagagaagctgccagaatttggggtgtatctgaaggctacgttagaaaaactataagtcaatcacctgaaaaatttcctgaaggaactgtccgcaaatttggcaaacaatgggtagttactactgaaggaatggaacatgctacaggcaaaaaagaccctagaaaaaattgatctctaaggtggctattttcaatgtctaattttttgctattgtaatgtgctataataaacgtagtttatattggacatgaaaagccgctcacagtttggctgtgggcggtttggtaattatcaaaaatctactgaatatccaacagatcaaaacgaaaagggctataaattaacaattgtcaaaattgtttgacagtaagttaagcaataaatacttcaaaattgacaaaaagagtcatcttagaggattaatctccgagatgactcttttgatagaaatttgatagaaataaatgaaatgcttagaaaagttataaagcatatttgattatataataagaaagaaaaatatcagtaaatatggggaaaaagaataaataaaactctctgtctccgctatatagaaaagtaactgttctagattaatttctagagcagtttttttgtgtaccgagcggcattcttagtccgatgaaagtgttagaactaagagccagtagcaatgatattatgagtatgggacgtttacaaaggagtaaatacctgctgaaacagtaaggaattacaaatgtatcgtcttatatgcaaccatatgtatagtggatggaaggagatgagttcgttaagttctctctgcattgaaaacacgtcataagatgttaaaaccttaattttgagttattgataaacctaaatgcatattattttgaatgacttaatggaaattattacacttcttttaggtaaaagtcttggacattgattcaagtcaataatcgtgtatataacatagggagagccgattgttttaaatttcttcttgtatgatctatattaaaaaaataattttgtgggggatttcatagtgatataaagaagcagtttaatatggaacaatttataaagatcatttagttaaagataagagaagctgttttgctctagctaatttgaagtattaagatagatataaatgttttacaacaaaaaaataaaaaagtacttgcattttgactgaatatctattaatattaaatacgttgtgattgagagatcacaatagtaatagctaattaaaaaaataaataaaaagttcttgacttttgaaatgtgattagttattataataaagtgctcttgagtgagttacatgacccgttggtcaagtggttaagacacggccctttcacggccgtaacatgggttcaaatcccgtacgggtcactaatggaggattagctcagctgggagagcatctgccttacaagcaggaggtcacaggttcgagccctgtatcctccattgttcgggactaccgccgcctcggtagtctttttttatgcaaaaagaacgaacaagcaaaattattattttatcggttcaagtcctgagaggattcactatgattagtgaagatgccttgtaaccgaatagccaatgtctatatagggggactaatatggaaagacgtttgtttacttcagaatcagtttctgaaggacatccggataaagttgctgatcagatttctgatgcaattttagatgcgatgttaaagaaggatcctaattcacacgtagcttgtgaaacgatcgtaactactgggatggtttttgtctttggtgaaatttctaccaacgcttatgttgatattcaagatgtagtgaggaagactattttgaagatcggctatgatcgtccagaattaggttttgatggcaataactgtgctgtgatggttgacatcgatgagcaatcacctgatattgctggtggggttgatcactcacttgaaactagagaaaacaagtctgataacgatgaattggatcaaattggtgctggtgaccaaggtttgatgtttggctttgcgattaaagagacacctgaactcatgccattaccaatttcgtttgctcatcgtttaatgagacgtgttgctgctttgagaaaagaccatactttagattggcttcgtccggatgctaaggctcaagttactgtagaatatgatgaaaataataagccattaagagtggatactattgttatctctactcaaactgatgcagaagtttctaatgaagaaatccatcgggcaatgattgatttagtcattaaggaagttattccggccaagtacctagatgaaaagactaagtttttgattaatccgtcagggcgttttgttattggaggtccaaagggcgattctggtttaactggtcgtaagattatcgttgatacttacggtggttacgctcgtcacggtggtggtgccttctcaggtaaggatcctacaaaggtggaccgttcagctagttatgcagctcgttatgtcgctaaaaatattgtggctgccggccttgcatatcgttgtgaagttcaacttgcttacgccatcggtgtggctcacccagtatcaatcatgatcgatactgccggcacaggtaaggttgacgatgaacttttaactgaagcagttcgcaacgtatttgatcttcgtccagccggcattattaagatgcttaacttgcgtcgtcctatctacgaacaaactgctgcatatggtcactttggcagaacagatgtcgatttaccatgggaaaagaccgataagactcaagatttgcttgattatattaaagatcatcaataaaaatattcgaggagtaaataataaatgaaaaaaacaaacgtgcctgtagtcacgcttgcgatttttatgacaacgtttatgaccgctattgaaggaacgatcgtttctactgcaatgcctacaatagtttcagaccttgatgggctagaaattatgaactgggttgtatcgatctttctgctgatgacggctgtttcgactcctttatacggaaaattggcggatagcattgggcggaagccagtttttttgtttggaattgcactttttgtcattggatcgtctttgtgtggcttagcgcaaaacatggttgaactgatattatttagagtaattcagggactaggttcaggagcggctcagccagttgcgatcaccattatcgctgacctttatactttgcaaaaacgcgctaaaatgttgggtcttagctctggtttctggggagtggcctcagttattgctccacttttaggtggttttattgtgcaacacctgtcttggcactgggtcttttatatcaatgtaccaataggaatcattgcgtttttattagtactagtgtatttgagagagcctaagcatagatctagttcaaaattggatttgcagggaacaatttggttagtattattgctttttgccttaatgttcttcttgcaggatcttggcagtagcatgaatttgctagttatggccactctagccgttttgattgtaatctctgtaattctattctttagagcagaaaaacgcgcagcggatccaataatgccgctctcgatgctgaaagacaaggaattctttgcattaaacattattacgctacttatttttggtgtagttattggatttgaattttatattccaacttggatgcaaggaattaatggtactaatgcctcacttgcaggatttgctgtaacgcctagttcattaatgtggattgtaggttcgttcttaattggcgggatgctaggccgctgggggattaaaaagacatatgattatatgttattggttttagttgtggccgatttggttttgattttagtgccgatttacacatcattctgggtcttctgtgttattgctgcctttaatgggaccgcctttggtgcgattacgacagcttcacaggtgagatcgcaggttttggtacctaaggatgacataggtgttgccacttcgtttaatacgctgatgaagtatctgggacagacaatgatggtttctatctacgggattgcttttaatacgatgttggcgcatgggttaagcaagagaccggggttgaatcaagaaatgatgaataaaattgtttctgcagaaaatgccaaaagtctggctgccaatgtagtgccacaattacggcaagttttgttaggcgggttaaaagctgtttacgttgtttctatgattgttattgtagtctcgattgtattgaatcaattgtatcgagatcgaaaattgaagaaaaattaagttgaaggagccacatgcaaagtagagcatgtggcttttttgtagaacttgtgattttataatttttaaaagaaaatatgaatttttaatttatataaaatacaaaatcaatattttgtaattaatattgaatttttatttcaaagagaatattatagttatgtaagggcttgcataaaaagccgtgaggtaaacaaatcaactattttctataaggagggtaagacgatggctgataaatattcagaattaggacgcgagatttatgcaaatatcggtggacctaataatgttaagtcaatgtatcattgcatgacacgcctaagaattaagatccgggataactctaaagtagatattcaaggcttgaaagatattgacggagttttaggcgtagtaaatgcggacacgttggaaattgtcctaggttctggggttaatgctaaagttgcacaagatatggttagccaagtgggagtgaaagaaaacgaagaattcccaaccagcacttaccagagcgaaaagtctgaagttcaagcaaaagctgcagaagtacatgctcaacataaggcacagttgaaacaaacatggtggcgtaaagctttaggccgtatttccgctatcttcattccacttattcctgcatttattggtgctggtttaatttcaggtgttgctggtatccttcgaaatatgttgacggctaagatgttgcctggtagctggaacttaggcgttactattctcagtatgattgctagtgcattgtttgcatatttgaacatttatgtaggtattaatactgctaaagaatttggagctactcctgctctaggtggtatcatcggcggtgttgttttgcttcctgggattgctgcaccggttactattccaaatgtattagatggtaagccgctagcagcaggccaaggtggtattattggtgttttacttgctgtatggcttttggcttatgtagaaaaatggttccataaacatattccagattccgtggatattatatttacgccgttctttactgtcctgattatgggactattcacagtatttgcaattatgccgattgctggttggatttctaattcattagtaggtggtattaattgggtgctcgatgttggtggtcctgttgctggattcatccttgggttgttcttcttaccaatggttatgctcggattacatcaaatccttacaccgatccatttatcaatgattcaaaaaatgggttatacaccattacttcctattctggcaatggctggtgctggtcaagttggtgctgcaattgccctttgggctaaatgtcgtaaaaacaaggatttagtaagattgattaaaggtgcgttacctgtaggtattttgggagttggtgaaccattaatttatggtgttactcttcctttaggtagaccatttattactgcctgtgttggtggtggtattggtggtgccgttgttgccgcatttggtcacgttggttcaattgctatcggtccttcaggtgttgctttaattccattaattgctaacaacatgtggtgggcatactgtattgggcttttatccgcatatgctggtggatttgttgcaacttatttctggggtgttcctaaagatgctattaaaggcaaagttgaaaatcctactcctgaagtttccgaaagaagagctgctgaaaagcatgctgataatttgaatatgcctagtgaaaaggctgaaatttcttttgaagctcctgtttcaggtgaattagaaaaaattgaagaagtaaaggatgacgttttttcacaaaagatgctaggtgatggctttgctattgatccttcaaatggtacagtggttgcgccagtagacggtaaaattgatacagtaatgaatactaaacatgcaattacattgaaaactagtaaagggaacttagatgttttaatgcatttaggattagatacagttgaattaaagggtgctccatttgaaattgacgttaaaccaggtgatctagttaatgctggtgaaaaaataggtacaatggatatcgctgcaattaaaaaggcaggaaaagacccagtggttttaactattattgctaatatggatcatattgatcaggtatcaaaagtagaagattcaccagttaaggcaggtcaagttgtctttaaggcaatgacaaaataatttttagaaagaaaatgatataaatgtcacttgaaaatttgactactgagcaacgaaataaaaatactatgcatattgattctatgtctacattagatatggtaaagacaatcaatgaagaggataaaaaagttgcagaagcagtaggaactcaagatgaagaaattgctcaagcgattgatattggctccgcacgttaccaacaaggcggcagattgatctatattggtgcaggaactagtggaagattaggtgttttagatgcggcggagcttgtcccaacctatggaattaaaccagaacgtgcaataggtttaattgctggcggtaaaggtgcaatgtatgtggctgtcgaaggagcagaagatgatcctaaattagcagctgaagaccttaaaaagcttgatttatcagaaaaagatgtagtgataggcttagcagctagtggtaggactccttatgtgattggtgggcttgattatgctcaaaaagttggtgcggctactattgcgattgcttgtgttaaacatagtttgattggtcaacatgcaaatattgcaattgaagctgttactggtgcagaagtaattacaggttctactagaatgaaggctggcactgcacaaaagatgattttaaatatgatttcaacagggattatgattcgccaaggtaaggtatatcaaaatgtaatgattgatgttttgccaacgaatgaaaagttagttgaacgtgctgaaagaatcattcaaactactacaaatgtttccttagaaaaagcagcaaaaattttgagggatgctgataaagatgttggtttagcaattgtaatggccaaaacgggtttgaaaaaaaatgatgcacaattgttgctgaaagaacatcagaataatgtaagtagtgtcttgaaagaagaatagatataaattaaggataaggaagagtggcagtaagtaatttaatttcgctgattgaagaaagaagacacattatgaatagcaagaagttaattactggaagttgtactgtagcattatcagtgatgatgttggcaagtactgttacatatgctcctattagtaactcacaggtgtatgcgagtgtggtaaaacaaaagcaagaaccaacaggtcaatatcaaattaatgatagttttcctattgatgaaaagaatgataatcccaaatttgatacttggtcattactagataatattaatcgaaagttttatggcttcaaaggtcaaggatcagtttgggtacacagtaataatgccaaaaattttgaattatatattaatgggaaaaatgttagtttaaaaaacattagtagtaataaatgggtaaaaattgatatcagtaaatttacaaaaaatggaaataatgctttacagatttcaccaaagaaaggtgttagagcaagcgataaatttgatattaaattaccttatcctacattagttgataaaactaaagaatatcggaataatgatacatttaaaactatggatgcactaattaattctgagattaagaatggatttccgtctgcagagttggttgttgtacataatggacaaatcattaagagaagtgcgtatggtagagtaaatgcatactttcaaaatggtaaacgccgtgttaatgctccaaaagttaccaatacaaccatgtatgatttagcttctaatactaaaatgtgggcaacaaatatggctatccagaagttggtttctgaaaagaaattaaatattgatgcaaaagtaagtagtatttttcctgactttaaagataatgctaatgataaaattaaaggcaagactgatttaactgtgcgtgatattttgatgcatcaagcaggttttccagccgatccacaatatcacaacaataactataatccggacaagcctaatgaacgaaagaagaatgccaaccctgtatatactcaaaatagagacgaagtattgaagaagataattgctactccattgcaatatgcgcctggaacaaaaacaatttattcagatgtagattatatgcttctggggttaataattgaaaaagtaacaggtcaacgagaagataattatgttgaaaataatatttataagccattaggcttgcgtcatttgatgtataacccattagataaaggcgtatctaaaaataaaattgcagccacagaattaaatggtaatactcgggatggacagattgattttaataatatacgtcactatacattgcaaggacaagttcatgatgaaaaagcatactatacaatgcatggagtaagcggtcatgcaggattgtttggcgatgcttcagatttagcggttttagcacaaatggtcattaatcgtggcggttatggtaatcacagaatatttgatgaagatactcttgatgaatttataaaacctaaatctacaaactatagttatggattaggttggagaagagaagcaagtactacttacagcggtaattatggatgggccttttcaggattgtccgatgcttcaactattggtcatacgggttggacaggtactttgaccgtagttgatccacacgataatactgcagttatcttgttaacaaatgaaagaaacactcctattcttaaacctgaaactactgctactgcaaatgactttgctggtggtcactatttgctatctaaatatggtgatattgccagtcttgcgttcgctgcaattaataaggacaattcatctgctaataatgccaagttaattagtcttacaatgcagagatttaacgaaattcaaaagaataaagatgatcaaacaaatgcagataaagcagacttatgtggaatttatgatgctttaaaaatgcgtagtaaaaagcataattctgtagcaagatttttagcgactacaaaaggaaagcaaattactgcatacgttaaggcaaataagaatgccgttaataatgttcgcaatagtcattaattaagaataaaagccattcaatatgaatgacttttattttattagggaggttagatgctaatgctaggaatatctgtatatttccaagattatgatgaaaactatttgaaaaaagcagctcaagctggtgcaaaatacgtttttacgtcacttcagattccagaagaagattattcagatctggatcaaaaattacctggattctttgaactgtgtaatgaattggggcttgaagtaattcccgatgtttctccagcaactttggaaaagctaggaattaaagaaggcgattttgaagctttaaaagataagggattcaaggctttaagattagattatggttttgataactttgatttaatcaaaaagctacaaaaaaaattctttattttattaaatgcaagtgttgtgtcactggattatttagatcgtgctagaaatgcaggagttgattttaataaattagctctaacgtacaatttctatccacatactgatacgggtatgggatggtcagattttaaacgtaaaaattggatgttgaaggattatggcttaaggactcaagcttttgttcctggggatgcacttaaacgtttcccactatatgaaggcttaccaactgtagaaaagcatcgtggagtttcaccttacgttgcagctgttgaattaattcatgaggcgaatgtagatgatgtgtttattggtgatagccaggcttcaatcaaaaatctccaatatattgtagattaccaaaaagagaagactttaaacttagaatgctctttattgccacagtatcaacaactgtatgatcaagtgatcgaagtaagaaaagatatgccagaaaagttgattcgattaagtttatctagaaagcctgatattccagtttgcaatactttaaataggcataggggtactattacaatgcaaaacaaattagctcaaagatatagtggtgaagttagtctgattaagtcaaatttacattttgaagcacgtagtaatgtaattggctttatttcacctgagtatgtgaagttgcttgattttattgattcgaatacaaaaattatttttagaaggctgacatagaagaaaggtgatattatgcttaatttggcgaataagatttcagatgtatatcctaatttgaataagacttctaagttaattgcagacgtttattttaaagaaccaagaatttttctaaataaaaatttacaggaattaggtaccattacccaaacgagtggtgcatcagtcgttcgcttttgcagaaatttgggctttaaaggttttaaggattttcaaatagcttgtgcgcaagaaatgcctaataaacaagatgctatggtagatacgattatcaatacaaatgatgaaccaacaagcgtgctttataaattgcaacttagcttaggaaaaaatattgcagacattggtaaaacaatagatcataaatctttagatgctgcagtagatttaatgcgatcagcacaacagatatatgttgcaggagaaggagcatctggtcttgctgctcaagatttgttttataaattaattcgtagcggaaagaatgttaatttcgttcaaagttcacatattgctttagaacaagtagcaaatattaataaagaagatatactaatcgttttttcctacagtggattaactcaagaaccattgctaatggcaaagcaggcgcaaaaaaataatgccaagatagttgcagtgactcgtatacaagattcaccactaaagaatatggctgatacagtaattacattgccatcaaatgagaagttattgcgctatggtgctattaattcactatttgcagaaatctttgcttctagcttgctatatttgagtcttatttcgccaaatttagaagaactaaatatgaaaatgaaaactacgcaaaatttgactaatcaattaaaagtgtagaatctataaaataacaactaaataaatttaaaaaaatcaaaaatattttcatgatgaaaataataaaaataaagaaaaaaaggaccagtttggtccttttttagtactttttttgcggttggaataaatctatatttgacaatgctataattataaatggaaagtggcctaaaaataagataacactattgaaagcgcattatttgcctccttgaaagtaaatctaagtagctgtacacttaaattgagctgaataacgaacgttatttttggcagagacttgtaatgcgagtaggaattatgggggcgtaaaaatggatattactagtttagcaagattccaatttgctatgacgacgatctttcactttttcttcgtgccattttcaattggtacgatattcgttgtcgcaattatggaatcaatgtatgttcatacaggcaagcctgaatataaaaagatgaccaagttttgggctaatatctttttattgagttttgccgttggtgttgtaaccggtatcattcaagaattccaatttggtatgaattggtccgattattctagattcatgggggacatctttggtgctccacttgcttttgaagcattgttgtcattctttattgaatctacctttattggtttgtggatgtttacttgggataaagtggggaagaaattacacttattctttggatggatgatcgtctttgggacaatgacttctgcattatggattttaacagcaaactccttcatgcagcatcccgtcggctttgctttacgcaacggtcgtgccgaaatggctgactttggagcacttcttaagaatccacaattaatgtatgaatatggtcacgtaattgttggagcacttttaactggtactacaattttgactgggttagctgctttccaactattgaagaaacgtaacctttcagacattaacaagaagatctatcgtaagacaatgcgtttaggcttaatcttaatgttaattttctcagctggtgaaattgctgtgggtgatatgcaaatgcaatatactttgcatgatcaaccaatgaagttcgccgcaactgaagctgtttataagacaactggagaaaaggctccatggacggtagttgcaattgctaatccaaagacccatgaagttaagggaattgatattccagacatgttaagtattctttcttaccacaagactactggttctgtaaaaggtatggaagaaattaacaaagaacttgaaaagaagtatggtacacatattgatggtcgcaagatggactactatgtaccagttaatactttattctggtccttcagagtaatgtgtggttttgctgcattattattcttgatggcaattgttggtttaatcatgactcgtaagaataaagaaaccctttataaccatcgttggctattatggatcttcgcacttcttacattctcaccattcttggctaacactgccggttggttaattaccgaacttggccgtgctccatggacagtttatggattatttactattgatcaaagtgtttcaccgaatgtttcagtggcttcacttttaacatcaaatattgtttacttctgcttatttactattttagcaattatcatgattgcattggttgttcgcttcatgcacaacgatccagatgaatatgataaggctcaagaggcaagcaaagtagttgatccgttctcaaagggggccatctaaaatgtcatttttacaaatactttggtttatcttaattggagtattgttctcaggcttcttcttccttgatggttttgactttggggtaggaatggccgtgaagactttagctcataatgaacctgaaagagatcaagttgttaggacaatcggaccagtttgggatggtaatgaagtttggttgattactgctggtggtgcaatgtttgcatcattcccatactggtatgcaaccttattctcaggttactatttaattttattattgatcttagttggcttaattattcgtggtgtgtcatttgaatttagagcaaaatgtgctccatatcaaaagcatatttgggataatgcaatggcgatcggtagcgtaatagccacctttctctttggggtaatgtttatctcaatgattaaagggatgccaatcgatgctaaaggtaatatttcagctagcttctttgactactttaactggttctcaatcgttggtggtattgctttaacacttctttgctatttacacggcttaaactatattactattaaaactaagggcgttatttcagatagagcacaaaactatgcacaagctttatactgggtactctacgtcggtgaagtggtctttgctttattattgattttccaaaccgacttcatgagagtacatccaattgcaactttaatatgtttagtattaattgtcggcttctctgtggcagcacatgtagctacctttatcaataagcaaggaatggctttagcttgcagtggattaactctgatctcattggttgcattaatcttctgtggcttattcccaagagtaatgatttcatcaatcagtagcaagtatgatttgcttattcatagtgcatcatcatctaactacactttgattgttatgactgttgctacttgcatcttggtaccatgtatcttggcttacaccatctgggcatattggatttttcgcaagcggatttcaatgccaagaatcggagaggttaaataatgattgataaacagctatttaaaattgatggcgctggttcaatcttaaaaaaacttgcagggcttgagattctgcaagctttttttatagtaggacaagccttggcactagcgtcagtcttaagcaaattgtgggcaggtgagtcactagactggctattgcttcttacttttgcggcatgctttattgctcgccagttaatcaatactttgcgtgactcaatgcttgaaaaatattctggtcaagttgcagaagagctgagacagaaacttttagataaagtctttcgtgatggtcaggctttagtccaaaaacaaggtactggtagtttgatcaccatgtcgttagatggtgtagatgaagtaagacaatatatcaaactgatctatagtaaagttttgacaatgatgattgtgccagttttaatctttgtcggcatgctttttttaagctggacatcagctgtgattctgctagtcatgtatcctttaattgtcttattcatgattatcctaggtcatgctgcacaggatcgagcaattaaacaatttggtaactttcaggttttatctaataactttattgattctttaaggggaattgatacgctgaagtatttaggcctgagtaaaagatattccaagtcaatttttaacttgagtgagggttttagaaaaaagacgatggcggtgctaaaagtagcaatgctttcaacttttgccttagactttttcactaccttgtctattgcaatcattgctgtttttcttggttttgacttgatgaatggtaaaattgcactttttcctgctttaggaattctgattctggcgccagattattttttgccaattcgagattttgcgggggatttccatgcaaccttgaatggtaaaaatgcctttaagcggatcaacgaattgattaatctgccagaggaaaaaactaatgatttatctttaaaaacttggtcagctcaagatcaattgaagatcaagaacttgaagtttacttatcaaaagggaaccgaaattggaccggtttcattacaagtccaaggattcaagaaaattggcattatcggaatgagcggatctggtaaaactagtttaattaacctgctcagcggctttttgactccggatcaagtgcaaattgaactacaagggcagaaaactacgaccatgaatattcctgcttggcagcgtcaaatgacctatattccgcaggagccatacgtttttactaagagcttgcgtgaaaatattgctttttataatccgcaggcaagtgatgatgaaattaagcaggcgattcatatcatgggtctggatgccttgttaaatgatttgcctaacggacttgatacggtgattggccgcggtaagcgtgtcttgtctggaggtcagtcacaaagaattgccttagcgagagcatttttggatcctaagcgaaaaattatgatcttcgatgagccgactgctcacttagatatcgaaacagaaattgacttaaagaagcggatgatgccattaatgcaaaataaactggtcttctttgcgactcacagactgcattggttaaaagaaatggactatattctagtgatggatcacggtcaattggttgagcaaggaagttatgagcaattgcagcaaaatcaaggctacttctgcaagttaatggcaggaatgagaggtgaaaacaatgatcaataagattccggttttaagagcattaaaaaatgatcgttgggttcgcccatatttggaaaaatatcgtaaaacgttgattttggcgattgcactgggcattttaactttcgtctgtggcgggggcttgatgttctgtgctggctatttaatcagccgttcagcagctaaacctgaaaatattttgttaatctatgtgccaattgtcttaactagagcatttgggattacgcggccagctgtccgttattttgagcggctggttagtcacaattgggtgctcaaaatgacctccaaatttagacaacagctttatgactcattggagcgcgatgcgactatttttaatagtaagtatcagctaggaaatattctgggacttttgtctgatgatgtcagccatattcaaaacttttacctaagaacgatctttccaatgtttgtatcttggggcttgtatgcaattatcgtaattggcttaggcatcatttccccactgatgggcatttggatgttgatcctgtttttcttgattatttttgctattcctatttggtcagtcttaatcaatggtgcgcggcaaagctatgaaaaaacggttcaagacaagctctacgttgatttgactgataatgtgatgggagtagatgactggattttgtctggccgcagcaaagaatacttggccttgcacgtcaatgatcaagataaatttttgcaaatcaacgcgaagatgaaaaaatttgatcgctggcgcgactttgttttacaaatcttctgggtgttggtaattgtgagcctagtaatttggggtgctgccagatttggcgggcgttcaacttattatactaattggattgcggcatttgctttggcattattcccgactgttgaggcttttgccagtttgccgactgctgctcaagagacgaatatctacaaagattcgcttaagcgtttgaataatttgccagctcctgatcggactaagcataaaccaatcaaattaaccgcaccgtttaatttagtattaactgatgtgcattatgcctaccctcaaactaataaagaggttttgcatgggatcaacttaaatatccatgatggtgaaaagattgctattttgggtcgtagtggtgcgggtaaaagtactttagctgccttgctcagaggtgatcgggtaccagctaaaggacacgtaactttaaatggaattgataccagcaagtttggcgatcaaatgtccaattactttagcatcatcaatcaaacgccatatttgttcaataccacgattgccaataatttgcggctaggtaatgaagatgccacagatgagcagctatgggacgttttgcgccgagtaggtttggccgagatggtgcaaaaattaacggatggccttgatactaaggtggatgaggcaggattacgcttttcaggtggtgaacgccatcgtttagccttagcgcgaatcttactgaagaatacgccaattgtcttacttgatgagccaacagttggcttggatccaattacggagcaagctgtaattaatatgtttattaaggaattatccggtaaaactttaatttggattacacaccacttgcaaggaattgatcagatggatcaagtaatttttattgaagatggacaaattaatatgcagggtacaccggaaaaattatggcagacagagccgcgttatcgtgaattgaaaaaggctgatttaggattatagaggttcattatgctaacgaataaagtgccagaacaagatgtgcatgacctatttactagggtcgcacctaagtatgatttgatgaataatattgttagtttagggattcaaaagagttggcgtaagaaatttttacggcagttagatttaaataaaaattctatttgcttagatttgtgttgtggtagcgctgattcaactattgatttgactaaaaaagctaaattagtgactggtctagattttaaccaggagatgttgaagattgcccaaaaaaagattcgtcaaaagcagctgcagtccaagataaagttgattgcaggggatgcaatgaatttaccttttgcggccaatagctttgattgtgtaactatttgttttggcctgcgtaatgtccctgacgctgttaagacgattcaggaaagctaccgcgtacttaagccgggcggacaatttgctgttttagaaatgtctcagcccactaatgcattagttaaattgggctggcaagcttattttaaaatttttccgtattttgctaagttgacacacggtaatatcaaggactaccagtatttgtcaaaaacaagtaaagaatttctctcggctgagcaattaaaaaagctacttgagcaaaatggttttactcgagtagcggttactaagttaacttacggtgcaggtgcgattcatttgggacgcaaagactaaagcgttcgattgactaatttacgcgtcatctttttgagcaagacggtcgcattagtttgcggcagttgggctaagttagctaatgcccgattagtgtattgttcagctaaggcatgagtttcttcaatgactgagctgtttagcaaaatcttttggatttgttcgatatcgtttttgctcatttgtcgctttttttcaagtagcggtactaattgctctcgtaattcctttttgctaagagctagcagagtagacgccggtagtcaaatcttctagcgttggcttgtttagctgcttgccgccagtgtaatcaagaatgtcgtcaacaatttgaaaagcaatgcctaagttttcaccaaaggaggctaaagcttgagtagtttgctcatctccattgccaaaatggcttccttcttcggcagctaaacgaaaaagtgcagctgtctttcctttaacattagttaagtagtcgttgaaatcttggcttaggttaaaacgttcagccatttggcctaattcaccagcaagtaaatggtgcattgtgtgagcatttttgatcatgtaatcttgttcggaaatggcgttcaaaattaggtcaaaaaagtgcgtaaaaagcaagtcgccagcgtaaactgcggtgtctttgccaaaacgggcttggatgctaattttaccgcggcgctcgtcagaatcgtcaatgatatcatcatgaattaatgaggccatatgcaaaatttcgattgatgaggcaagttgaataatttgttttgatacagtttcttttttgctagcaatttgagctgacaaaattagtaaactaggccgtaaatatttaccaccgttactagccatttcaaggagtgcatcttgcaagtctgaatatggagtgcggatggttgcctgaattaattgattaacttcttcaagcggtttacgaataagtggatatttttgccaaggttgagagttattcatgatagatttccttataatagagttaacagaatagtgatcctttgaaaggatgtggatcgatgtcattaagtgtatttttagaattaattgagattaaagcaaaaaccgctagtgtcattccctttttcttagggatgtgctacagcgtgtattattatcaccaggttaactggggatttgccctagtcttcttcattgcaatgctactatttaacatggtagtagatatgtttgataactactgtgattattatcacgcagatagcaagaattaccaagagaagactaacattatcgggcgagaaaatatttcacctaatttagttctgggattaattatttcctttagtcttattgcaattttattaggtttgtatctagtcgctaaagtaggcttgcctgtattgtggatgggcttgttctgttttatggttggttatttatattcatttggtccgcatcctatttctagcttgccactaggtgaattgttctctggtttcacaatgggcttcatgattgtcctgctcagtgtttatatcaatagttttcaagtctttgcttggaactgggccacaatcgggcgcattttcttattagccttagcagatgaattatggatttctaatttaatgctagctaataatttatgcgatgcccaagaggacgaagataatcatcgcaccacgattattcattttattggtaaaaaaggtggcttgattgcttttagtgtcaaaaatgttttagcatttttggtaatcttcctcctaccgttcttgggaattgctcctaagacggtttggttaacagtaataattgtaccgttcgtttataagcagaacaagatcttaattggcaagcaagttaagacagagacatttatcacaggagtaaaaacgttgctagttggttcactgacttacttaataacttactttttaggaattctattttagagaggttgaaaattatgaaaacagttgtagttttaggtgctggttttgccggcttgaaaacagttgtcgctttgcaaaagaagttgcgtgaacaagttaagattatcttagttgaccgtaatccataccactacgaaacaattcgcttatatgaagtggctactggtgaaattccctacactgggatgtcatatgaaattaatgatgtaattaatccgaagatgactactgtgattacggatgaagttgaaaaagttaatattgctgataaaacagttgagttaaaggatcatgctccacttaaatatgactattgtgttgttggcttaggctttaccttgagcaatatgggcattaaaggtgcaaccgaaaatgctttgccaatgagcaatgtaaaacaagctgaagctattcgcgaccacctttatgccgaaatgaaggcttatcgccaagaccatgattctaaacacctgtcagtagtaatttgtggggcaggttttcaagcaattgaattaggaaatgccattgccaaggttcgcccagaactagctcaaatggctggcgcccaaccagatgaaattaccatcagaatgattgatggttcgccacgtcttttgccaatgttccaaggtaaattgcttgattacgctttaaacacaattaagaaaaataaagtcgaaattattaagccagcttatgttaatgaagtaacctctacctcggttttgtataaaatggctaatgaaaaagacaatgctgagctgcaagaaattaaggcaggtactagaatctggatgatgggctttagtggcagtccagtaattgaggcatctggatttaagaaccgtcgtggtcgggtcatggttggtgatcatttaacagcgccagaaagtgatgatatctacgtcttaggcgatgtttcaagcgtcatggttcctggtaagaaatggccatatcctaacactggtcaattggctctttcaatggctaactacgctgcaaaagatattaagagcagaattatgggtcaaactagaccggataactatgcttaccatgacttaggtgtagtagttaacttgggtaattcagaagccgcaggattggcaatggggcatgcttttaaaggatactttgcagcaactcttaagaagattaccattgataagtcggttcttgaaactggtggtattaaagaaacaatggcgattggtcaatttgacttctatcactaaaattgaaaataaaagagaataaaaaatcacttcagtttgatttgatatgaaccccaaatttgggacatattattgaactgctttatttaaaaccatatttcgatattctatcggagtatggtttttttagtactgttttaattctttcatgattgtagtaattgaatgtattaggactaaagtgtgaagttgcgccattttatgccacaccaagaagacctgctattcaccacactatgggtggcttagtaatcgacactaaggctcatgttttaaataaggacggtcaaatcatcgctggtctttattcagcgggtgaaaatgctggtggtatccatgccggtaaccgtttaggaggaaattctttagcagatatctttacctttggtagaattgctgccaatactgcttatgaggataaacatgttaccgatgttattactggcgcttcgcagaaataaagatagagtataaaaaaatacagatatatcaatttaaatattggtatgtctgtatttctatttggagtcatttttccttaccttcgaataaaaacccatgatttctaattcttactaacaaaaataatagtaacttttttctaacttcccaaaaaaattttgcgacttttttgcgtaataaataatagaggataaatatcatcaaattatttaaggagaactttgcatgagcaaagagaaagaactaaatgtgtctgaagcattaggttttacggatgatttgatgtttcagattgttatgagagatccagagatctgtcgtatgttcttgaatgaggttctaccacatttggacattcaagatatcactgtccgcacgcaagaaaggattgcttttaaccaagaagataaagtttcgattcttgatgtcctgattacggatagcagaggcaggcgttacaatgtggaaatgcaggtcgcgcataaagcagacatggataaacgagccaggcaatacctgttcaagatgatggaagatggctttttacgacgaaaacaagaatatggcgagctgcacgctgcatatgtaatttttattctgccgtttgatcccaaaggaaaaagcttgaagcgatatacttttgtttatactgctaaggaagacccatcagttgaattaaatgacgattctgcgataatatatttaaacacaaagggaacaaaaggcaagatcagacctgagcttgatgacctttatcgcatgattgaaggcaagccaacttcaaatggaaaactcgtcagtcgaattaaaaagtcgatgaacaattatcgtagaaccgaagaatggaggcaacacgtcatgaacacagaagaagtagcagaagcagcaaagcagcttggcatggaagaaggcatacatgaggcaactgttgcagcaatccataaaacgattaacatgcttagaaggatgaagcgcagtcccaagcaaatcttgcaagaattagaacaagattatggcaatgaattttctgaagaagaactagcagactttgtgaaaaacgcctagtcgataagatataatgatagctgtgaagctatcattttttagataacgggggcttgatcatgaataatcctgaagaattacaacattttttagatgttctgctaaaagagagtaactttaccagagcagctaaagaattatatatttcccagccttatttaacgcagctaattggacgaattgagaaaaaattaggcactaagatcatcaaccgagatgagagaccctatacgttaactcctgcaggtctaatttactatcaatatttggagaatgtttcatataataagcagcaattagggcgcaagctggaggcatatactcatcctgaccaacagataattaaaatcggcattttggagagcttaggtacatatttattgccagaaattttgccgcaatttttgcaagaaaaccccaacgtcaagattcagctatttgaaaatttccccagagaaaatgaaagaagactgcttaatggcgagctggattgttatattggtcagacgccagaagcacttgactcgagtttagatgtggttgcgggtggcgaggaacgctattacgtagtgatttcgccagcctcaccatattaccaagcaggaaagtttatcttaaattcggatgaacttgatctaaaagaggtactgcaggagcctttagtgttgagttcacctggttcagctatccggcatcaagttaatggcttatttcagagattaagactcgaaaaaaatattgtgatggagtctaatagtattattactgcaactaacttggcaattcacggcgtgggtattaccatttcttcggcaagtattatcagaagaatggaacaaacgccaattaacttgttgccactagatcgaaagttaatggatgttgtctttttcattactagcaaaagcggggaaaagtcgccagcgttagaaaacctaatttcaatttttcaaaagacgcatttacaagcaaaaataggataaagaaaaaggcatcatgcgatgccttttaaattgctttgatttctattgttttcgtttcatgtcgatcatcttcggctcaatgtagaagtgatagaggaaggaataaccaagcagtacaaaggtaattccttcaatccaaccgccgaatacatcagatggatagtgcacgtggacgaaaattctggtgtaaccaatcatcagtgggaataaagcccaaataataatcaataaagtcttccagaatttgcttctcactaaaagaatggttaggataatcaaaacaccaaatagcgccgcgctaccaactgagtgccccgatggaaaactataaccatccgcataaactaagtgcttgaccgttggacgctgccgcattgctgcgtgtttgataatccaattatagccattagcacagatcatgacaccagcggtaaaccaagcgtatgcatattgcttaaagaccagtaaaactatgaaaacaatgattgtttcaattgtgatcacgcttgtattgccgagattagtaaaatctttagcaaaagcgacattagctggattattgttgcaaacaatgttgaccacagcattatcaaaattgtgaataaattgtgagccggatgaaaccagtgcggcccagacagcataaataaccacgaagcagataccaggtattaaggtgtccttaggtggtcgtttcgtattaatcaaaaaagtactcccctcttgaaatttatagcatttgtggtaaattataatcattatctataagaaaataaaggtcgagaagtagtaacaaggatatttttttcagagagagactggttggtgcgaagtcttagaataaaattgtgaactcgtctcttaataaaacctagcgttgccatccgcgttaaggagcaattaagtgtcacaattttgtgaaacttaggtggtaccgcgatgattcgtcctatgattttttcatagggcgttttttgatagtaaaggagagtttatcttgtataaccacaaagtagttgaaaagaaatggcaagattattggtcaaagcatgatacctttaagacaggtactgaccctgataagaagaattattatgcattggacatgttcccattcccatctggtaagggacttcacgtaggtcacccagagggctataccgcaactgatattgttgcaagaatgaagcgtgcacaaggctataatgtgcttcacccaatgggctgggatgcatttggtttaccaactgaacaatatgcattgaagactggtgaagatccagaagttgttactaagaacaacattgctaactttaagcgtcaattgaacaagttgggcttctcatatgattgggaccgtgaagtaaccacttcagatccaaattactacaagtggacgcaatgggtttttgaacaaatgtataaaaagggcttggcatatgaagctgaagttcctgttaactggtcaccagacttaggtactgttgtggctaatgaagaagttatcgatggtaaaactgaacgtggtggctacccagtatatcgtaagaatatgcgtcaatggatgcttaagatgactgcatatgccgatcgcttattagaagaccttgatgatttggattggccagaacccgttaaggaaatgcagcgtaactggattggtcgttctgaaggtgcgcaagttactttcaaggtaaaagacagcgacaagacttttgatgtctttactactcgtcctgatactttatttggtgttagctatacagttcttgcaccagaaagcaagcttgttcaagaaattaccacacctgaacaaaaagaagcagttgatgcttacattaagaaaattgaatctaagtctgatcttgaaagaactgatttgaacaaagataaaactggtgtcttcactggtgcctatgcaattaacccagttaatggcaaggaagtgccaatttggatttctgactacgttttagctagctacggcactggtgcagttatggctgttccagctcatgatgatcgtgactatgcttttgctactaagtttggtttgccagttaacccagttattgaaggtggcgatattgaaaaggaagccttcacaggtaatggcaagcacttcaattctgagttcttagacggcttggataatgaagaagctaaaaagcgcatgattgaatggcttgaagaccataactgtggtaagaagaaggttaactacaagttgcgtgactgggacttcagccgtcaacgttactggggtgaaccaattccagttattcactgggaagatggaaccacttcattagttccggaagatcaattaccacttcgcttgccacatgcaactgacattaagccatctggtaccccggaaagtccacttgctgacttgactgactgggtaaatgttgttgacgaaaacggtagaaaaggtaagcgtgaaaccaacacgatgcctaactgggctggttctagctggtactacttgcgttacgttgatccacataatgataaggaattagctgactacgatttgcttaaaaagtggcttccagttgatctttacatcggtggtgcggaacacgctgtgcgtcaccttctttatgcaagattctggcacaaggttctttacgatttgggtgttgtgccaactaaggaaccattccagaagctttacaaccaaggcttaatcttgaagaatcacgaaaagatgtctaagtctaagggtaatgtagttaaccctgatgaggtgatcgatgaatatggtgcagattcacttagaatgtacgaaatgttcatgggtccacttgatgcatcaattgactgggatgacaatggtcctgcttcaactaagaagttcttggaccgtgtgtggcgcctctttgtaaacgatcttgatttgaaggccattccacaagaaagaatcgttgataagaatgatggtgaacttgacaaggtttatgcagaaacagtcaagaaggtaactgaagactttgaatcattacactttaacactgcaattagtcaaatgatggtcttcatgaatgctgctcaaaaggctaagaccattccacgggaatacgcagaaggctttgttaagcttttagctccagtggctccacatatgatggaagaaatttggcaagtctttggtcatgatgaatcaattacttacgctaagtggccaacttatgatccagctaagttagttgagtcaactgtagaaattatggttcaagttaacggtaagcttcgtggtaagttccaagctcctaaagacgctgcaaaagatgacttgcaaaagcaagcaatggaaattgaacacgtaaagaagttcttggaaggcaaggacgttaagaaagttatcgttgtgccaaacaagattgtcaatattgttgctaaataagttagattttcctaaaaaataataagaatacttattatttagatttattgaattgattagttgagacttttattgggaaaattttaatggaagaaaataacttaaatagcaaagatacacaaaatacttttctaaaaggttccgcatggatgacctttggctcaattgcctcgagaattttgggtgctttgtatattattccgtggtatgcctggatgggctcctacggcaatattgccaatgctttgactgcgcgtagttataacatttatacaatttttatcttaatctcgacagccggaattccaggagcaattgctaagcaggtagctaagtataatgcactaaacgaatatgggattggccgcaaattatttcgcaaaggcttaattttaatgaccgttttgggtattgtctcagctgcgatcatgtattttgcttcgccgcttttagcttcaaatgggagtcaaagtgatccaagacaggttgcagttatgcgtagcttgtcttatgcgattttaattattccaattttgagtatcatgcgaggctatttccaaggttatgccgatatgatgccaagtgcgatgtcacagtttgttgaacagtttgcccgggtagtctggatgttgctaacggcgtttgtaattatgaaactgcaacatggttcatatgttcatgcagttattcagtcaaacttagcggctgcagttggtgctttatttggaattggcttattaatttggtttttgttttctagaagaaaacaactagattatttggttgcccattctaataatcgcttgcgggtctcaacgactgaattatttggtgaaattattgcacaagcaattcctttcattattattgattcaggaattaccttattttcattggttgaccaatataccttccacccgatgattgccagtctagttcatgctagttcagatacaattgaggactggtatgccttgtttggtttgaatgctaataagttaatcatgattattgtttcgctggccagtgcaatggcggtaaccgcgattccacttttatcagcggcgcatactaggggagactataagagcatttcaaagcagattgctaatacgatggacctatttttatttgtaatgattccagctgcttttgggatggcagccatcagtaggccaatttatacagttttctatggtccagatctattggggagcaacgtactatatctgtcgtcatttaccgcgattagtttaggattatttacggtgctgatggcgattttgcaaggtctttcgggaaatggactggctatcaagtacctggttttaggattgattttaaaagggatcctgcaatatccaatgattttcctatttaaggtatacggtccgctggttgctactaatttaggtttattaattattgtggcactttctttaaaacatttggaagtgcagtatgattttaatttgaatcgaactagtagaaggctggctggagttacagcattttcagttggcatgttccttgtggttaaattatgtgaaatgggactaggcaagtttctcaatcctgatcatagatttaatgcattggtgctagtgattgtagctgtaggtgctggggttgtcttttatggcttggtgacattgaagacagggttagtccaaagcgtcttaggtagtaaggtagaaagtattttagttagactacatatggataaataaaagaaaatcaaactgttgtgatggcagtttgatttttttgttataaaaaattgcggctctttgtcaaatcttactgataaggtgtcaagtctaatttttcctggtagttgagtaaatttttggccgggggatggcttacttgagtaagtttttgtgcaatttctaagtgaatcaaccctaattgtcaaaaaactgccactccctcttgcaaagacgataattagtgttattatataatgcataagaaacgcaagaaatgtgtataaaaacaattatttttagcaaaggaggcaaaaagcatgattaatctgactgttaatacaatcaggcttagcggtgtcgctgcaagagcaaaccgcgtcatgttttaactgtcctttagacaaagtgaatcaaagataatttaacagcacagtattaagtacacccggtttatcggcggcatcgttaactgaagattttttgttatgcgtgttagctaatgaggtattaagatgaacaagggtaagactttaatgactggtgctgttatttttatgtgcgggagcatgctggcggcctgcggcaagagccaaggagcatctgtcaagcagaatttaaactggatgaccagtgcgaaaatcatcaccatggacccatccaaagccaccgacaccacgtccttccagcagattgaaaatacgactgaagggctctaccagctgggcaaagacagcaagccggttaaggtactggtcaagaagacgactgtcagcaaagacggtctgacctggacttttgaccttaagaaggggactaaatggtctaatggcgaaaccgtaactgccaaggactttgtctattcctggaagcggacggtgaaccccaagacagctagccaatacagctacattttctctgggattaaaaatgccgaccagatcgttgctggtaaaaagaaggccgatacgctgggcgtgaaagccgctggcaaatacaagctgcaggttagtctggaacataagattccatacttcaagcttttgatggccttctcagtctttttcccagaaaaccagaccgcagttgaaaagtatggctcaaagtacggtacgtcatcaaaaacgaccgtttataacgggccattcttgcaaaagggctggacgggctccaacttgtcctggaccatgttcaagaacaagaactactggaacgccccgttaagctgcaaagcatccactttgccgtggaaaaatctccgtcaacggcttactacctctaccaagatggcaagctggacacggcaagcctgagctcacaagcctccaagaacctgcaaaagtcaccagactatgttgtaagaaagaccaacgggacgacttacttccaatttaacctgaaaatgaagaagttccagagcaccaagatgcgtcaagccatctccatggccctagacagaaacgccttagccaagaccttgggcggcggctacacgggctctaagaactttacggcagctggcatgaccaaggtgggtgacaaggattttaccgacctctctcaaaccaaggaaagcttgctagtaacgggccaccacaagcagctggcccaaagctactttaaggaaaggttgaaggaacttggcttaaagaagctgtcctttacggtgattacggcacacgtccaagtccatcggcgaatacttccagagtgctcttgaatcaacttttggcaagcaaatcgacgtcaaggtgcaaagcctgccaaccaagtcccaatttgccaagatggactctggtaactttgaagccacgatcagcggctggaatgcggactttgccgaccaaatttccttcctggactgcatgacctctactaatggctacaactcaggcaagtggatgaagctgctggcaaaggctgaaaacaccttgctggttgatcagcggctcttactacttcgaacacgtctacattgccaagtaagccagtaaaaaatgtattatcatgctaggtattatgtagtagaaagtgaagaataaagcgtaaattgctataattaagatagaaataagggaaaatcttaattagtgaaggagcgaaagataatgaaagactcaaattcaccaatttacaacatttggatggtggttctgctggttgccgcatatgtctggccaatctttggcttagcaccagccatctacctctttatcaagcgcaaggatgagaatctggtccctttgaagaattggattactctagccttgatctggcagattgttttgtggctgctcttgattttggttgtcgtctccttctgggtcggcgcctttgcggtcaaccacggttaactaaataactaattgaatagctagataaaagtcagtggatgccactggctttttgtctgcttaagcaaatgtcataactatatcactatttatagccttgaatagatttaatcggttacataatgcatcacgcaggtgatatctcacaaaaaattaacaaaagcatcaggttcaaagattgttaagccgatgttaaatagaactagcaagggtgaaagcggtacatttttttctttgttaagctaatgtaaactaagaaaaataacgttagaatattaaccgattttcgaaaaatggtaaagatttttccaaaatccggccagaatttaaacaaagttaagtattttactttgatttaacatttccccctgaatgtatttaacctccattaattactatttacttagtaagaattcaaggaggataattatgttaggcaagaaaactagagtagtggttatcgcacttgctctactggctatagtcgtcggctgcgttgttggcagttcaaaggcagacaccaagggtgtctctgggactgttaacgctgcggggtcttcagccctgttgccgctagtccaaagcgcagctaaatcattcatggatgaaaatccagacagcgtgatcaacaccaacggtggtgggtcaggccaaggtttacaacaagtctcagatggaaccatcgacatcggtgactctgacttgttcgcagaagaaaaattagacaagaagtccgcatccaagctggttgaccaccaagtggccatcaccgcgattgccccaatcgtcaacaaggacgccggggttaagagcttaaccacccagcaattgatcgatgtttacactggcaaggttaccaactggaaccaagttggcggcaatgactgcaagattgttttgatctcacgtcctgcttcttcaggtacccgggcaacttttgaacaatatgctttaaacaagactgccagtcgttcaaaccaatcactggaaactgacgactccggtactttgatccaaatgattcaaagcgttgaaggggctgtcggctacgttgccttatcatacttgactggtaacccagacgtaactgcagttgccatcaacggcgttaagccaactctggacaacgtttacaacggctcatacaaggtttggaactacgagcacatgtacaccaagggtcaaccaaagaaggctgctgttaaggcctttttaaagaagatgttaagtaaagaatacgaatcaaaggttgaaggcatgggctacggtgttgcttctaagctttcagacaaggctaagaaagaacacaagtaaaaggagagtgatttttcatggacaaggtagttcaaaaagccatcgctagcgataagcgctggcgggcagtatacattgcttgcgggctcttgattgttgctttgacgctcttgatgggggcattcctgctctaccaaggtagtcaaacctttatcaaggctcaccacagcatctgggaattcctgtttaccagcgactgggcaccgcttgacaagaccggcctgtttggcgggaaagtcggtgcagcagtttacatcgtaggttctcttgaaacctgtttgctggccctggttatctgcttgccatttgctatcggctcagcagtttacatgacggaaatctcaccaaagatcggtgaaaagtacttccgtccagctacggaaatctacgtttcaattccatccgttgtttatggttggtttgggatgaccaagctggttccattgattaaaaatattttccatccagccatgggtgggtactcagttttggccgcatccattgttttggccatcatgatcttcccaaccatcaccgcggtttccgctgacgccattaagtcagtgccaatgagctaccgtgaaggtgcttacggtttaggcgcaacccgctggcaagtaatcggcaaagttgttttgccagcagcttcaggcggcatcttgaccggggtgatccttggcttggccagagcgatcggtgaagccttagccgtagccatggttatcggtaagactcgctcatttgcggcaaaccttttgtcaccaaccagcaacttgacgagtgccatcgcagccgacatgggtaacactgcccaaggcggggaatacaacctggctctgtggaccatggcgctgctcttgttcatcatctcaattgtcttgattgtgctcattcacaaactggctaacggaaagaaggataaataatgaaccgtgctaagaaaaaagatcggtttatgaccggcgtcttttacgccatcggctggctgatgctagcattcttgctgtatttgacatttaccattatctttgatggcttgaagggctttagcccagacttcttaggggctgccggcaacgggatcttcaaccaattctttaacactctttacttagttttcctttcgctcttagtttccgtgccaatcgggatcggggctggggtttacctggctgaatacgccaaggaaggcaagctcttgaccatgctggaagtaagtatcgaatcactttcttctctgccatccatcgtaatcggtttgttcggctacctggccttcatcatgtggacgggaatgagctggaacatcgtggccggggccttgacgatctcaattttgtcaattcctttgatcactactgaaaccaacaatgcaattcgtgccttgccaattgaatacaaggaaggttctctaggtttaggtgcaaccaagtcagaaaccattagaaaagtcttgattccagctgctatgccgcaaatcttgactggggtcatcatggccgctgggcgtgggtttggtgaagccgccgctttgctgtacacgtctggtcaatccacttacatcaactggcacaacttctggaagattacttcacctacttcacctttgaatccattcagaagtggtgaaactctttcactgcacatctgggtcatgagaactgaaggggctttgaaccctaaggcaacccaaattgccaactttacttcagctgttttagtagtactcgcactgctctttactttagttacctgccgcatttcagacaagatgcgtaagcgcaataacggaggaaattaataatggaagacaaaattactatcgaaaacttgaacctttactacagtgatttccacgccttgcatgaccttaacatgcacattccaaagaatgaaatcacggctttcatcgggccatctggttgtggtaagtctactttgcttcgctgcttgaaccggatgaacgacctggttgaaggctgccggattgacggttcagttaagttagatggtaccgacatttatggcaatgaccttgacgtcactgttttgagacagagagtcggcatggtcttccaaagaccaaatccattcccaatgagcgtttacgacaacgttgcttacggtcccaagatccacggcgtaaccgacaagcaagaacttgacgaaatcgttgaaacctcattaaagcaagctgctatctgggatgacttgaaggaccgtttgaacaagtctgctttgggtctgtctggtggtcagcaacaacgtctttgcatcgctcgtgccttggctgttaagccagaagtcttgctgatggacgaaccaaccagtgcccttgacccaatttcaacttcaaagattgaagaattggctctgcaactgaagaaggactacaccatcgttatcgttacccacaacatgcaacaagccgtgagaatttctgacaagactggcttcttcttgctgggtgacctggtagaattcggtgaaactgaccaactcttctccatgcctaaggatgaaagaactgaaagatacattactggtcgtttcggttaaagaccagtaataattagatagagtaagaaaggcagaaacaatgactagatcaagatttgatgaagaattggacaacttgcaaaagtccatggaagacatcggcaagctgtgccaggaagccattttggaagcaaccaacaccttgtttacgggcgactaccataaagctgaagactcagtcaacttgcaccgccgcatccacaagagcgaacggaaaattgaagacagctgcttgcgcctgttgatggagcagcagccagttgcgactgacttgcgggtgatcagttcttctttgaaggccgtttacgacctggaaagaattggggaaatctctgctgatattgcagaactcgtgttaaatgaacacctgtccatcgccaatgaccagctgaaccttaagtccatggtgcaaacctcaaccagcatggttgatgatgccgtaaccgccttgtccaccaagaatctggaactggcgcaagcggttatcgaccgcgacgacattgttgacgatgactttgaccatgcccgagaaatcctgatcaacaacttcagcaaggatggcaatccagaatacctgatcaacctgatgatggttgccaagtacttggaaaagatcggtgaccacgcggtcaacgttgctaagtggaccaagtttgtggcaactggcaaggccggaagataagtcttggaaagtttgctaaattaatattcttcctgatctatctgcatagcaaatgtttctaagctataattagagtagctatttgcagatagattagggagaatttttttatgactgaaatatggtgtgtggaagacgacgaaagcattcgcgaaatcgaaatgtatacgctggagtcgatgaactttaaggtgcgtggctttgaagacgggacgacttttgtcaaggccctggcggaaaagcatccagatctggtcatcttggacctgatgctgccagatgaagatgggagcgatattttgaaaaagctccgtggcaactcgtcaactgaagaattgccggtgatcatcgctagtgctaagacagccgaatatgacaaggtgaagaacctggattctggggctgacgattacttgaccaagccttttggcatgatggaaatggtctcccgggtcaaggcggtcctgcgccggaccaaccacaagaaagaagacaagatcgagaaagacgggatcaagatcctgctcaagcggcatgaggtttatgtcgatggtcaggaaatcgagctgaccttgaaagagtacggcctcttgaagctcttgatcacccatccagggaccgttttttcccgagaagaaattatggatcaaatttgggaaacgggcttttacggtgaaacgcgcacggtggacgttcacgtaagaaccttgagacaaacattgagtaaggctggtagccatatcgaaacggtgcgcggggtcggttatcgctaccatgaagggaattaatgtttaaaaaaatatttcgggcagtctttttatcaacggcagtcatgctggtctgctcggtggttttgagtgcgctttttttaggcatcgactatgatcacaatgaggtcaacaccttggcttcgcaggccgatttggcagccagcggggtcaacaatgggggaaggaagtacttaacccagctaaaaggagaaaattaccagattacctggatcaatgctaaaggcaaggtactctacgacaacgaggaaaacccagccaagatgggcaaccacgctaagcgcaaagaagttgctgaagccatgaaaaagggcgaagggcaaagcgagcgctacagcacgaccctgtcgacggttacgatgtactatgccaaaaagctgaaagacggcggcgttattcgggtggcggttacgcggaattcgatctggatgaccatcttgcaattgctgacgctgatgctgatcatcttgctgatcgccgtgattgcttcttggttcgtagctaagatgatctcgcagtccatcgtcaagccgctgaaccagttagacctggaccagccgcttgaaagcaagagctatgaagaaatcaagccgctgttaacccggcttgacagtcaaaacaagcagattgctgaccaaatggagcagctccaccaccgggagaaggagttcaagacggtcaccgatgccatgcaagaaggcctgatcttgatagacctgaacgaccaggtcctcttgtccaatccggcggtagtatcgctcttaggatcaaagtcttctgaagttttgccagatgatgttaaaaagatcatcgatcaagacaagcggaccgtccacaccgaagggatcgtggaaagagaagggcgcaacattcaaattagtgccagtccgattttttcacggaaggtcttaaaagggacttcgatcttggtcgttgacgtcacagaagaataccatgaagagcaggtccggcgcgaattcacggccaatgtgtcccatgaattgaagacgccgctgcagtccatcatggggtcagcggagcttttggaaaacaacctggtcaaggaagacgatcggccagccttttaccggaagatccatgaatcttcagctcagctcttgaccttgatcgatgacattatctggctgtctcacctggacgaaaatccggaatttgaagaggtccggatgaacctgaagagtccggtgaccgaggcgatcgaagccttgcaggcgtcagctgacaagcacgagattgagctgaaggcggctttggccgatacagaaatcaaggccaacttccgcttggtttatgaaattgcctacaacctgatcgacaacgccattcgctacaacaatcctggcggccaggtcaagattgcggtcaaggaagtgcgggggcaagctattttgcgggtttctgacacggggatcgggattccgcttgaagcgcaaaaccgcatctttgaacggttctaccgagtcgacaagtcccacaaccgcaagactggcgggacgggacttggtctgtccatcgtcaagcacgcagtacagcagtgccatgggacgatccgccttgaaagtgaactgggcaagggctcaacctttaccgtggtcttcccagctttaaagcatgaagacaaattatacagccaaaattgcttatttgatctatgataaaggtgtcgaaagaaaataagagctctatttaaataacatagacataatcatgggctaagtgtatataaagtgtaatttagaactatacaatatatacgtaaaatcttatgattaaaggtgaacagatattatagccactttttttaggattcgattaatgtaaaaattacacaatgaattaataaaaagcgccatataataagcaaaaaaaatcatttaaataactaaaataaactgagacctaaaagttgagactgtaaaatagtttgtgtaaggatgaatgattccttaaatttatttctttaaacattagaaaaaggagttcctttctcgtatgattggtttgaacaaaaaaaacacatacagaaagaagaactccttcatgaatgattttaccaaagattttgctcaagctctattcaatccagacaaaataaatgatttattgcgcaaagaactacaacaggctgttaataacttgctagaagctgaattgactgcctttctgggctatgatccctatgccagaaatggctggaatactggcaactctagaaatggtgcttatttccgcaaagttgatacgcaatttggcccaattgaagtgcaagtgcctcgggatcgcaacggtcaatttcatcagcacacgctgcctgactacaagcagcactcggatatcttggaaagcatgattatcaagctttactccaagggcgtgaccaccagggaaatagccgatctaattgaaaagatgtatggcagccattacagtccagctcaggtatcaaatatttccaagcagatgattccaaaggttgaggcttaccacaaacgcaagctaagcgacaagtttttctgcgtctatttggatgcgacataccttcctttgcgccgagaaacgtttgagcgtgaagcagtctatattgccattggcattaaacctaatggacataaggaagtcattgactactgcattgctcctagtgagaacattgaagtctggacagagatgcttcaaaacatgaagtccagaggcttgaagcaagttgaactctttctttctgatggtgttgttggcatgaaaacagccttggccaggacttatcctaaagctcattttcaacgctgtttggttcatgtcatgcgcaatatctgcgctaaagtacgcgtcgaagatcgtgaaaagatcatgaacgaattcaaacaggtgcatcaacagacaaacaaagaagaagccacagctgtcctgcatgacttctataccaaatggggcaaggtttacagccatgttatcagaagcttgaaagacatagaaccagatctgctggtcttttataactatcccaagcagatcagagcttcaatttattcgactaacatgattgaatcatttaacaatgtgatcaagcgcaaagctaagcctaaggcagagtttccaactgaacagtcgcttgatgcatttattggcatccaggcaatgagctacaatgaccgttatttcaatcgaattcataaaggctttggtcaggttcaggacaccttagaatcctactttgattaaataaataattaaaaaatcaatttacgagaaagaactatttacacaaaagatttgacagtttctaaaagttagacacttttaggtcttttactatgtctaaatttaataaagaacaaaaaatagaaatttatcataaatggaaagatgaaaatatctcaatcagtcaattggctaaagcgtacagaatgaatctagctaatttagactatatgcttagattaattgatatgcatggaatagaaattttaactactaaaaaccaaagctattccaaagagtttaagcagcgaactattgaacaagcaatctttggcaataaaccatacttacagctgtctttggaactggggtttaaaagtattggcatgcttaacaattggattagagaatataagaaaaacgggtataatgtcattatcaaacagaaaggacgccctgcccgtgaccaaagaaaagcagaaatctcgcaagaaactggagaaagagatccagcagctgaaagaagaaaacttgcgattgcgtattgtgaacgaatacgtaaaaaaactaagtgccttggaccaagaagatcagaagaaatagctagggtgattacggatctaaggcaagaattcaaagttagtttaaattatgtattagctgcgattgcagagcaccctgagctacctataattgccagaagctcatactacaagattatcaaacgacagcccgtcaagcctaaacggtcaaagcttattgctagaatccatgagatttttaatcatcatcaaggccgctatggatatcgcagagtagctttgcagttaatcagagagggctggaaagttacggagaaaaccgttcgctattggatgcataaattaggtcttaaaggcatcaggcgcaataagcgcaaatattcaagctataaaggtactattggcaaaatagctccaaatttaattcatcgtgatttcttcgcagccctgcctaacacaaaatggtatactgatatcactgaatttcatcttaataatgaaaagctttatttatcgcctattctagacggctgcggtggcgatatagtttcttatactatctccaaacatccagatatggatttagtaatgacaatgcttgacaaggcttttgccaaagaaacagctcttaataactgcatttttcatactgatcagggctgtcagtatcaaagccctcgttatcagcgagctttaaaactccatggtattactcaaagcatgtccagaaagggcaactccatggatgatgggctaatggagaacttctttggcctgctcaaaactgaaatgttctatgatcaagaatacaagtatcataatcttcaagaattaactcaagcaatcgaggaatatatcgaatactataacaacgaaaggataaagagcagattaaaaggcttaaccccgaaagagtatcgaagtcaagcctctattaatccaatattttaattgtctactttttacgtctcagtacaaaaattatagagccggttttttagtactgttttaattctatcatgattgtagtaatgaatgtattccttgattgcttgttctaattcacccatggttttgaatgtcttttcaaagccatagaacatttttcgtttaagaatgccaaagaagccctccattaagccatcatctaatgaatttcctttacgtgacatagactgggaaacaccatgatttttaagccaagcttggaaaacagcgtgctgatattgccagccctgatcagtatgaaaaattaacccattgagtgcaggatgcttttgataagcttgatccagcatgtccattacttgttttagtaccggatgacgatttaatgtataagcaacaatctcttgcgtacatccatccataataggcgacagataaagcttctctccattaaggtgaaattcagtaatatctgagtaccaatgtctatcaggaataattgctttaaaatttcgtttaattaaattgggcttgatttttccaacagtccctttgtagcttgaatatttaaatctgcgtctaattgcaatggcatatagatgcatcttggtcattaatcgtttaacacgtttatgattaactataatgccttcacgtcgcaattgggcagtaattctacgatagccatatctatgcttgtgctcctcaaatatttctttgatccgttccataatcttttcgttttttaaatctttatcatctttagttaaagtgtagtaataattactgcgtgataaatgcggaagatcaggattggagttaatcgtatcaagcacaaacttaacggttacgtggagttcttgccttagttgcgtaaccgcagaaactatctcttgtgctgttggttttcggttcttggggagactaaggcgctcaatttttttacaaattcgttctcgacagtaagtcttaagttcttctgtttgaggtcttttatttgcttctgaagctcttgaatctgtttgtctttgtccttcatgggtaggtctgcctttcttgtgattaatgacattatacccgtcttctttatatttgcgaatccaattgtgaagcataccttggctgggcagtcctaaatccaatgatacctgacgagccgtttcatgatcataaataactcttttgatggctttctctttaaattcaactgagtaatctttatagctattatcaagaatttctatcccatgacgttctattaaggcaatcagataaaacaaatttgtacgatttaccccatattccttagcagctaggttagctgatatattataatttttccaattattgtaaatatcaattttgtcttgtttggataatttagtcataataaaaacctcgaaattcttgtccgaatttcggggttcatatcatttgtttctgtagtgccttttttataaatatcaataaattttaggagtgtaataagattttagaattaattatgttcaactgctgttaacgtaatgactccaattaattcaagtgccaaaaatgtaattccaaggatagtaatcatagtgcccatctccttatctaggagataaataattagaatatttatcttttaattcaatcattgcttacactgttactgtaccacataattgcgtattatgaaagcgattacattaaattgggagaaaaaagttgacctccgaagaaatcaacttgtgcccctgccaaggacctatattatagcattcatttattctgcatgatcatcctttttctcagttgagtcaggattttgatcgtcagacttggtgaagtcaccattcatggtattaggacgaccagtttgataatcaactgtgtgcttttcagccttaggtgcgctttgaccaggttcaggcataaccatagcagcaataatatataaggcaacgccaggaaatacacctgtgaataatatcaatgcagcaccgatgattctaacccaagcaggatctagatcaaagtagttagcaataccgcccaaaacgccagctaaaattttattttgtgattttgtaagtcttttttgcatgataatcaactcgtttctaactgttctatctcttttacatatattatacagcaaaggcatgaaaaaagtgttgattgctcaacacttacacataattatgatgcccgctaaaagattcgaactttcactcagtcacctgaacagcgacctgaacgctgcgcgtctgccaattccgccaagcgggcaattttctttggtacatgaataatcataccaaatatttggtaaaatgtaagcataaaatactttaattataaaaaaggatggaaattcatgttttttagcaaaaaaataaaacgtgcagcaattaccacgattgctgcagtatcaattttttcttgtggtgcggtatttgcaactataccagttagcgcagatacaactagtagctatcaagctgatcaagttaaactaaatgtaaagtcagcaattgcaattgatagtgattcaggtcaaattttgtatgccaaaaatgcgactaaaactttgccaattgcttcgatgactaaattagtaacagtttatttaactctgcaagcaataaaaaatcataagctttcatgggatcagaaagtaaagccaatggctccgatagtaaaggtagctaataatgcagaatattcgaatgtaccattaaaactaggacattcgtatacgataagacaactttatcaagcaaccttaattgaatcagctaatggtgctgctatgctgcttggtcaaacaattgctggctcacaaaaggcatttatcgatcaaatgcgagctcaagtaaaaaagtgggggattgaagatgccaagatttatactgcttgtggtttacctaatggcaatttaggtaaagatgcatatcctggtgtaaataaaaatgctgaaaatacgatgtcagctaaggatatggctattgtcggtcaaaaattaatctcggcattcccagaagtattagaaactacacgcttagctcacttaaactttaaagatgctggtcacgtaactaagatggctaactttaactggatgttaaaggggctttctcaatatgatcaagcttatccagttgatggcttaaagacggggactactgatgctgcaggggcttgttttatcggaactgtacaacacaatggtgctcgtttactgactgtagtaatgggcgcacgtcaccgtgacggaacggatccagctagatttgaacaaactaaaaagttaatgaattatgtttttaccaagtatcgtcctgtaacaatgactgctggtagccaaatgaatggcgctaagacaattaaagttgttgatggtgataatgcaactactaatttaggacttaagcaaaagactactatctgggatccagctgatggcaaaactttagtggcatcattgaataaaaaatctgtagaagcaccaattaagaaagatcaaacagttggtgattatcaatttaaatctggtaatgaaaagattgtttcattgtctaatcctaatgggatgaacgtcaaggctaaggcattgtcagctaataacaaggtgaacttttttgtcagaatttggcgctggattttcggaggaagataaatatgactgaaatttctgaagatatcttgaaaaaggtaattaaagaaagagaaagcgatacacataaaggcgattacggtcgtgtactcttgatcggtggtagtgagaactatggtggcgctattattatgtctaccgaaggcgctattaatgctggcacaggtttgactgctgttgcaacacaccctttgaatttagcaccgttacatgcacgagtgcctgaagcaatgtttatcaactggcgcgatgctaagttagcagatttaatcaaaaatatggatgttgtagtttgcgggccaggattaggcatgagtgatctcgctaagcaaattttagttatcttgcgaagatgtacttcagaaaaacaaaccgttgtcttagatgccagtgctcttgatttaattagtcaggataagaacttattgccaactaatgctggccacttaatcttgacgccgcatcaaatggaatggcaacgattgagtcaaattcgtattccgtttcaaacagatagtgccagtattgatgctttaaaccaattgattccagatactaatgcgcttttagtactcaaatcgaatcatactcatgtttataatgggactggtcaaatttttgttaatccaattggcaatccaggcatggccactggtggaatgggtgatactttagcaggaatcatcggtgggatggttgctcaatttggcccaggcgttgaaaccgttcaagctgctgtctatcttcattctttagcaggtgacttgcttgccaaagataattatgtggtacgaccaacggaactttctaaagtattgcctaaattgatgaaaaagtattcagaattggcataaacatgttaaaattctaatagtaaataaatgcatccctagttgagggatgttttttaacgcttcaaagacgaaaaagcataatataattgagttaaatattaataaaaaagaagattaacatatttatgaaaaaaaacattattatcggcgtaactagtatcgttctagcttttggtgcaattatcggcttagctaaggtatgcgcacctaagtctgatgtctcacaagaagctgctacaacgcagactaaggccaaaactaagaaaataaataaaactaagaaaaaacaaactaaaaaagtagataatggtgctttatatcgaccatatagcgatcctaaggacttgcgcaaggcaggcacttggaagaaaaagagtgagcctaaaaaatatcctaagattaagccatatgaaaaggatttgactttgcgggtatcattaaaaggaaaccggacctatttgttaagaaaaggcaaggttttgtataccatgttatcaactggtggaatctacaagaagggcaagtcattgaccccaactggaacttttaggatccaaaatggtcgtggagacagctttttcaattataacttaggtgaaggagctaataattggactagttggagtcctgataacgtgtacttgttccactctgtgccaactaaagctgattatagctataacttaaaagaagcagtcaaattgggaagaactcaaggttcacatggttgtatccgtttgagtgtacctgattctaagtggattatggatcacatcccagatggtacgaaggtaatcattaaaaataattaacaagaacgttgctttttaagcaacgttttttaaaaaattgcagtaaaaaactttgttcaaagcgttcaagattttaatccaactcaagaatggtttttttaaccaaattagtggcagaagccgttttttcctgctataatcatgtttgccaagaagtcaaaagtagtagttattttctttttaagcgagtctatgttggtgcaagatagatactagaagataatgaaggcgtgtttgactgataaaatcaagaatttaaataagcggatactttgtatcaatctgagtggtaccgcgggtttttaactcgtctctttctacatttgtagaaggagacttttttatttagaagagaggaataagatggactttaagaatgaagtagttgacttggttgctagtcaagttgatttacctaaagaaaaaattgctgcattaattgaacgccctaaaaatgctaagatgggagactatgctttcccagcatttattttggctaagactttgcacaaaaatcctgcagaaattgctaaaaatattgcggataacttatcaagtgataatttcgctaatatccaagcagtcggtccttacgttaactttgcgattgaccatgaaaaattagtttcatcgactttgaaggatgttttgactgaaaaagaacattacggtgatcaaaagattggtgaaggaaatgtgccaattgatatgtctagtcctaacattgctaagccaatgtcaatgggccaccttcgttcaactgtaattggtaattcaattgctaagacaatggagaaggttggctatactcctgttaaaatcaattacttaggtgactatggtactcaatttggtaagttgattgctgcctacaagcactggggtaatgaagaagacgttaaaaaagatccgattatgaatcttttccactactatgtaaagttccaccaagaagctgagaaaaatcccgaacttgataatgaaggtcgtgaatggttcaagaaacttgaagacggggatccagaagcagttaaactatggaaatggttccgtgaggtttcattaaaagacttcaagcgaatttataaagaactaggcgtaacttttgattcatacaatggtgaagctttctttaacgataagatgcaaccagtaattgatgaattaaaagaaaaaggtcttcttcatgaatcacgtggtgcgcaagttgttgacatgggtgaaggtgaaaatcctgctattatcgttaaatctgatggtacttcaatttacttaactcgtgacctcgccgctgctgaatggagaatgaaagaatataacttcgttaagatgctttatgttgtaggtaacgagcaagcccaacactttgttgaattgaagactgttttgaaaaagatgggttatgactgggctgatgaaattcaccacgtaccatttggtttaatcacccaaggtggtaaaaagttatctactagaaaaggtaacgttgtcttcctcgatcaagtattaaaggatgctgtttcacttgctaaaaaacaaattcaagaaaagaatccagatttagcagatcaagatcaagttgctcatgatgttggtgttggtgccgttgtcttccacgatttgaagaatgatcgtttagacaattttgactttgacctagaagaagttgtgcgttttgaaggcgatactggtccttatgttcaatacactaatgctcgggcacaaagcgtcttacgtaaggctgctgcgatgggtgaaaatcctagcgaaactgatctagctcttgatgatgactgggcttttgccgtagccaaagatttagcagatttcccaagaattgtagctagaagtgccgaaaagtttgaaccttcagtaatagctaagtttgccttagatttagctaaaaaattcaataagtactatgctaatgtgaagattttaaccaaggacgataaaattggtgctcgtctcgccttagttcaagcaacatcaatcgttttaacggaatcacttagattgttaggtgtcaatgctcctaaagaaatgtaagagaaaaacaatgaaaataagaaaataacgcttacattctgtgaaaaattgttcatatttcaattattagggtacaataggcatgtaagatatttaggaggtattttttaatggcttattttgacaacggtaatcaaatctttaaagatgctcgtaagaaccattacgctgtaggtgcttacaacactaacaacttggaatggactcgtgcagaattacgtgctgctgaagaaactagaactccattgttgatccaagtatcaactggtgctgctaagtacatgggtggttacaagttcgttaaggacatggtagctgaccaaatggattcaatgaacatctcagttccagttatcttaaacttggaccacggtgactttgaatcagctaaggaatgtatcgctcttggttactcatcagttatgtttgatggtcacaagcttgatactgaagaaaacttagctaagactaaggaaatcatcaagttggctcacgaacgtggtatttcagttgaagctgaaattggtaagatcggtgaaaaccaaggtgctgatggtggtgaattagcatcagttgaagacgctaagagattcgttgctgctggtgttgacaagcttgcttgtggtattggtaacatccacggtgtttacccagaaggctggaagggcttgaactttgaccgtcttaaggaaattgctgaagcagttccaaatgaaccacttgtacttcacggtggttcaggtattcctgaagaccaagttaagaaggctatccaacttggtattgctaaggttaacattaacactgaattccaattggcattccaaaaggctactcgtgaatacatcgaagctggcaaggacttagacaagggtaacaagggttacgacccacgtaagttattgcttccaggtactgaagctattaccgatgctatgaaggaaatgatcggttggttaggtactaagactatcgatgacgaacttaaggatgcttcattcgaccgttcatcattaaacgaagaataatcatttgataattatttaaataaagtctagcgtttgctaggctttatttttttaggcaaatttggtgataacttaattgaacttattataaaagaaatataaaacctgaattgtcaaattaagtgcaacagttaggctatgaggaaatatattgcttgaagagttcttctgctgtgtgatattgaaggattcgacgatgtttgcggttaatggcatcagttgcctgttgaacataagcagctgacttatctttcatgcttttgcctttagggaagaattgacgcagaagtccattgcagttctcattggtgcctctttcccatggagaatatgggtgggcgaagtagatctggcagcctttgatcttggtcatatccgcaaactcagagccattgtcaaacgtgatcgatttaaaccaggcaggatgtctgtcaatctcattttgaagcagcctttggcatgtgcttgcccgatagtcaggaatcttgataactacttcaaagcgtgtggttctttcggtcaaagtcattaaagcaggctgattcttgcgtctgacgcctttaaccagatctccttcccagtgcagcggcgtttttctgtcttcaatctctttaggacgctgttcaatggaattgccaagatgcttcttgtgcaaagcatgaccgctatggccgtgatgacgcttgttcctgcgtcttttgagcttcataggcagatcaatattgcttatgtccagcaagccctgatcaatatagcgatagacagttggtgtgctgggacaagggtagcctggcatagtccttttgaattcaccaacgaattcatcgatgctggtggcatcaaatttagctttaaagcgtctggagagcattctcaaaaagacagcataatgcttcaatggattgcgctgatagcagtttttgcgacgcttctcataataaatctgtgcagtatcagcgtaatagtgctcatacaataaatagctgctgtctctttgcaggacacttccgcgtttgatttcgcgactgattgtcgacttatggcagccgacttcttgagcgataacagtacgggaagttatgccggaatccagcattgcttgaatttgtccacgttgtacgctggttaattgatgatagtgcttagaaatgctagaatttgaattggtcataaagatcttcctttcttgatttttcgtcacttcaagtttaggtcttcatggcctttttgtttaacacttagtgttgcacttcaattttaaatccgggaaagaaatataaaataaaaaattgaattataaagaaagtataaaaagagacttttatggaagcaaaaatgttaaatccatttatgcctaactttggtcgttttcctaaaattattatcgatcagcaagaagctttaactgattatttaactgggttgcaaacacatgatgctaagtatcaaacttctttagtttatgtcacaagaggatcaagaaaaacagttttccttttaaatgttcaaagatctttagaagagttagataattggatatttattcgtttaaataatggtcaaggagatttgctttttcaattaatgcatggtttgcaacgagttgcaggtatttcgttagttgacttgttaaaaagtgttaaaagtttgaatattatgggaaagggaattactgggcaagcactacaagaatcacagcaaattgattatgatgagtatatttcaattttgctaagtcgtttaaaaaagcagggtaagtcaattctaatcggaatagatgaaattgaaattagtgacgatgttcgggcttttggctcagaatatcaaacattgattggtgatgaataagatatttcattattgatgacaggattgccaagcagaatatccgaagtacagaatgaataataccctcacgtttttactatgtagtaatcgtgtttatttatcaccgttggatgaaaaaacaatagctaatagctatgagaaagcatttactaaaggaaaacgtgaaattgatttcatggtattggatgaaatgagccgtgcagttaaaggctatgcttatgcctttcaaacgattggttattatgcttggcgatttagtcgggaattattgcagttaaacgaagaagttttgaaacaaacaattcgagctgcaaaaaaggacctttttaggaatgcctatgaaagaatgtatatggatctttccaaaactgatcgcgattttatcgaagcaataatcaaagctggaaccgatcgtgtcacgacaaaacaattgcaagatatcttaaacaagcctattaattacatttcggtctatcgtgcaaggctgttagatgatcaattgattacatcccctcaaagaggagtagtacaattggcgttgccattttttgcagagtttgttgaaaaatctaatttagaacatttatcttagaaaatgagcaaatataataaattatggcaatatatcaaagataataaggctggggactttgagctttcttttgatgagcttggccagcaggctggggttgccttagatcattcctttttgcgttataaaaaagaattaccagcttatggctttgaggtgcaaaaaatttcattgaagaataaagtggtgaagtttcatcagttgtaatgaaagctattaataactaaagtagtagtttgcgataatatcttcaaaattagtaactatgttttgttttagaaaaagactaagatgtaagtaaaaaatgggaggattaataagttactatgaagaaggttttatcttggccagtatattatcaactatcagagatttatacggcgccattaaatgtaatttggtttgtctttggcgcggcaatgtcgtttcaacaatatcacatgtttaatttgattaacattttactgtgcttagtagatgtttttctgtttgatttagcagttaatattgctgataattactatgattatcttcatggcaaagatcgacattttttgactgatataaatccaattggtcgtctgaagttacctttaactgatgttagaaacttagtgtggattagttactgaaaattgaaagcaccaaaatcaagctcaagtcctgtcactattgagctttcttagacgtaattagtttttatatgatctgtttcagtgcaatttgtatgaatcgtggcagttggttaataaagtcattgattacttcatctatcttttcaaaactattctgtttaagctcttttaattctgaaattaagtagaccaatgcatctacgaatctaatatcaggtaaggattcgttcattagatagaataaatctccgattgtcttatcatctgtattttgtctttcctgccaggtcaatagatcataagttattgctgtaactgcgatatagccacattggccatcatagctttgaacttgagatttatctaaagcaagatattgcttagacgtcttaaaatatgtttcaatttgccatctacgaccataaagttggatgatttcttcagggctaagctttgtctgagtagtagctaaaaccaaatacttgttcttgtttccacggttggagacaaagacgagctttaataaaaagctatgtccatgatattgagcctcaactatgcttgaataaagataatgtttctttttacggatgtttgaagcagccaaacgatcatacaagtctttaacgctatagcggcgatggcgataaatgtaataaatctttgaactcttcttgatcatgccaagtccatctaaaccgatcttctttaaaatccaaaacattcttggagaagaaaaccaagaatcgaataagacgtatttagcttctactcctaatcgtaaggcttgtctaatcaactctacagttacatcattcatctttctctgagcttgatttctccttttaccagaaattgaacgttcatcagcagtaatgggagcagctccaatcatatttttcttggttttggttgacatcaaggcaaagttaaccggcaagaaggtattgccatcgctccagcctaaagttaaaccacgatatccgttcaaatactcatgcttgtcatggtcatagactttagctagcaattcggtctttttagaaaaagaccgagccatcagcgtatcgtcaacgataaaagcaagtcggcgtcttttatcgataaatggttttaagcagccaatgagccgggctgcaatcaagcataatagtttttgccagttgattcttccatcgttaagtacattgcgagcagttctaacggaaaaacgtttgtcatccttagctctgaataaagaaagccgagcaaaatgtactgacatcagccaagagataatcatggttaatgaaacggtggatttacgcttaaaattgacttgtttagttaacttagctagaccaattagattaataaatgaagaaattaaggatttagtatcattttctgtgtcgatttgttctatactgttcattgcgcaggatctcctttactttttaggtcgacacttaaagtataacgcagagagagcctgcgtttttatttttgataagaaaaagccaagaggcgcggggaaggagcgttaatcttagctttcaagtttcagttagttactttatttcggcgattccgggtattattttggtttatcgcaccggctggccagtactaataatgggagttgtaggatatttcattggaatattttacactgcgggtcctaagccactgaatgcaacaccgatctgtgaattagtggtatctttttttatttcgtatttcattatgctagtaagcatctatgtcacaatttacggcacttatcctttgacctggaacttagcattaactactctgataagatgtttgcctttaacactcattttctatgctttgcagttagctaataatacttgtgatttgcatgaagatttaaacaatgggcgccatactttagccagttatactggtaaaaaatatgctcttaaaataattaagacgttgattattgcgggattattatttccaattatcgttgttctttttggtttagcaaaatggccattgatctttagttgttttttgttgccaatattatggccaaaattaaaacaattttttgagcatccggataaacaaactacctatttacaaatgattaagtatttatcaacgcgtggtgctagttaaatcgttctagacaataagccaaattataagctaaaattgcaatttccaaccggctttgaaagcctatcagactacgtgctcgattgttctcggcattgtaataggtcagaagcgaaaagtcgctttcaattgttctgcgaatagccatcaattgatgatcattgtgctttttagctcctgtcatatttttacgatatggtgtccaaagttcataacccatttgttttagctgttgatgcagttctttgcctaaatagccttcgtcgccaagaagatagtaattagatggatgtgcattttccagcagttcaactgtctccctggcatcatgaactgatgcctttgttacgacataatcaagaatgtaaccgtcatcgctaacaatggcatgaactttgaaaccatagaagtaaattttcttggtggccttataaccaatgttggcataaccgcgaaaaattttagcacgatagttgcgaattggttggcaaacaggtaccggaaagctgtcaatgatcaagaaatgtccattcaggtcaacctttttattcatttcttgccgtatctgataaatcaattgcaatagctgacgtgaacgtcgattaaaacgtgagtgtgataaacaattgaaacattcacagaatcttctttgtgattcaattcctgtcttagcttgccagataagtaaagccaaaatcagactgtccgtagttttaatttgatcaatatttcgccgatgagtaaactcagccggtgcatacaaacgataccagtgccgacaaattatcactaaatctttaaaactaacttgtaaatggtggctaaaacgcttaagcttaaggcagttcaatcagatcagactcttttctattattactatttacaagtcgagtctaacaagattggacttttttattaactaaaacgatttaactagcaccacgcgtatttatcaatatttttcattacatatatagctatttatacagttttggttttagtttagaggaaaattatggctttgaatatcatagatagaggattacactcattgataatgagggggggaaataattatgtttggcaaaaagaaggataagaattcagaattttcaccagatattatgactttaaaaaatgcacttgaggaagtacgttttacgcccgaagttgagcatgacgcagaattaattaacatgtttgacgaagcaattgataaagccgagaagggtgaatctgttcaaacaatttatggtcgactcagttatcaaattacgcaatatattcaaacacatcatttcaaggcacccaagccagtaactgaattcttacatggaagtactggaagcgtagccacgggattgacttcagttccagtttcttggaatacagtacattaggaattttttatgtgcataaaattgacaaatactgaaaaataattgattaattaaacagagtagcaggtaatactactctgtctttttattgcaaatatgatgtcaaatgcgaaactgtaaaatagtttgtgtaaggatgaatatttccttaattttattttcctgaatattagaaaaaggaatccttttcccgtatgattgatttgaacgaaaaacatactagaaaagagattccttcatgaatgattttaccaaagatatggctaatgctctattcaatcaggataaaattaatgatttatttagacaaaagctccaacaggctgtcaatgacctgcttgaatccgaattgactgcctttttaggctacaatccttatgagcgcgatggctggaataccggaaattctagaaatggtgcttattaccgcaaggttgatacgcaattcggacaaatagaaatcaaagttcctagagacagaaacgttgagtttcatcaacacactatgccagattataaaaggcatactgatgttttagagcaaactgttatcaagctctattccaagggcgtcacaacccgagaaatcgctgatttgattgagaaaatgtatggcggctattattctccagctatggtttccaatatttctaaagaaatgattcccaaagttgaggcatatcatcagcgacatctgtcagataagttcttctgcgtttatctcgatgccacctatattcctcttaagcgggtcactcatgagcgcgaaacagtttatatcgccatcggtatcaaacctaatggtcataaagaagtgattgactactgtattgcgcctactgaaaatattgagatttggagcgaaatgctcaaaggcttcaagagtcgcggccttgaacaggtagagctcttcttgtctgacggagtagttggcatgaaagaggctatctgccagtcctatcctaaagcgcattttcaacgctgcttggtacacgtcatgcgtaatatcagtgccaaaatgcgggttgacgatcgaaaaaaagcactggatgaattcaagcagattcatactcagtcaaacaaagaaatggctgtacaggtgctgcatgaattctatcaaaactgggaaaaagcctacaaaaacgtagttagagatcttagacaggttgagcctgatctgttaaccttttacaactatccgccagctattagagcttcaatttactcaactaacatgattgaatcctttaacaacaggcttaagcggaaaaccaagcctaaaacagaatttccaactgagcagtcgcttgacacctttattggagttcaggcaatggattacaatgaccgttactttaacaggattcataaaggatttgggcaagttcgagacaccctagaatcctattttgattaaaagataaataaaaaagtcaatcaacgagagagattatttacacaaacttcttgacagtctccaggattgcattactatagtttatgtaagttatgaataggtagtaagtaacttatgaatttcaagatattcattgatttaatgaggagaacgaaaatgaaaattttcaacaagaaaaacttattattgtcatctgcagttgttgcagggatgctattcacagttggtactaaggctgttcaagctgatacaaccgatagttcacaacaagcaactacaaatactttaaaggtaaatgcaaatactgcagttccagataagaatttgattacgccagtagctagccgtgataatcaaactcttcgtcaagttgcagaagcaaacaacacttcattaagtgtattggaaaagttgaatgataatattgatccagataaaaccattgctaatggcacgccattatatcttccacaaaatgaagatttgtcaggactatttggtatatatcttagatcagatacttcagttccaagctcattaaagagaaaatattatgatagtctttcagcaaaagagagagctgctaagatgtggattattgcacgtgaatctggtggaaattacaatgcaagaaatggtatctatattgggcgttttcaattaacaaatacttatttaaacggaaattatagcaaagcaaatcaagaaaaaacagccttacgatatgttaagggacgttatggttcatggtcggcggctaaaagattttggcaggctcacaactggtattaataaataaacggaaagtggaaaaaatgaaatttcaaaaattagtaactagtgtattattagtagctagtaccactggtgtattaatgactgcacctaaacgggttcaagctgtagctgataccaatactactgagagtggaaaacccgtcgcaaatattgttaataagcctaacctaacaaaacaaggttatgtgttaactattcaagccccatcagggaagatttatgtagggcaaaagaattacaagaaacaattaactactactaagccaatatctaacgcaaaatcagttagttggaagaaaattaaaaacgttagatttagaattgaaaaagttgcttatgcgacaaaggttataaaatttggtggagcaccacagtatctgcttgtctctaaagataaaaaatatagttgctggacaacgcgttattctattaaatactatttttggaatactaaaaagatgcaacaagtaattaagccattgtctaaattgacaactagaaactcttcaagcctaaagaagattcggaataagcaagattttaatcaagctgtattagctgctaaaagattacctgctaatcaaagaaaagttgtcttagaatctttgaatcaagtgaaaaaagttggcaatattgataaggctgaagataatattttgttgttcagcttttagtgatatttctagcacagatttaaaattaatataaaactgaagttagaagaatttatttaatgttgaggggaaagaaattgtgagaagtatatctaaaggcattgtatctttgatagcagctacaatgttattagcagcaggggaagggatagttcctaatactgttaatgcttctatgctagattcggctaaaagtagccagaatagtcaagaaagtagtagatacacttggcagagtgttaagctaacagatggaactgaaatgcaaattcttccagataattcttcaaaattagctggaaagattaaatataacggtcaaatatattcatatcgcattgtttcaaataatggtgtatatactatttatttgaataatgaggaagtatattcagttgatataaataatagccagttacctacgacaagtgtaggtggttttgatccatttattaattttacgtacgcaaatggtaaggtagcatttaaacatgcaggtagaaagtattattatttgacgacagagaaatatagtgcagatacggtaagaagactgaaaggaactactaaggatattattattggtttgcttggatttgttcctgtagttggcccctatgtttctgccggcggttttgcctatactgtttggaaagaatcctaaaaataaatggtatacgataaaagaatattgcactagagggtatgaatattatgcttggaagacctatacttatactgactctcatagaaaacatctacaatctgttaaatgggagtataaaaaagtattatgagaggaattttaactagtagagttgctagaggcatattagcgtttatatttatattttttacgggttggtctgctgcaagattaatagtacagatagaacgttctgaatcgatatatgactaccttattttgggaggatttagtctagttttaggtattttggaactctatagattaataaatagtaagtaacctgaaaattttagaaaattgaacgttaacgtgaatatcaatataacacgcttagcttaaatagtcttattacttaaacttcccacacgcaaaattgcttgtttcattgtgattctgcgtgttttgacaaatataaaaggcacaagtccttttcattgctataattatattgaccaaaacataatttatttgcatgaaaggcttgtgccaatgtctattttaccatctcctgaccaacaaaatgaacaactattttcaaactcaatcatcagcttcatcaagaagtttcaggtgatcaagctgttgagaaaatgtggcttccgcaaggaaaaaggcattagcctgttcagcttgtttctttacgttttaagcaatgtctttcgtgaccgcagcttatatatgcagctgaaaatggatcattttcaagaaaatttttccaagaactcatattaccgttttatgcgcaacgttcacgtcaattggctccacttcaccacacgtctgtctgcgcaaatcattaataaccacttgcgatctttgacttcagaaaaacgggctgattgctttgttgtcgatgattcctacttctctaggaccggcttcaagaaaacagaattagtcgccaaagtttttgaccatgtatcaatgacttacaagaaaggttttcgcatgatgaccctgggctggactgatggagcttctttcatgccaatcaattcagtgctgctgtcttctcagaagctacagaatatgattggcgaaaataaagtttttgatcagcgcaccattgctggccaaagacgtatgcttgcccggactaaaggcacagacgtgatggttaatttaatcgaccaagctatgaaagcaggtcatcaagccaagtacgtgctgtttgacagctggttctcaaatccacatcaaatcgtccagctcaagcaaaggaagctggatgtgattgccatggttaaggttagctccaaaatcaaatatgaatttgagggagaacgcaaaaacatcaaacagatttatcgcagctgtaaaaagcgatgcggccgttctcgctacctgctgtcaatcccagtcaaagtcggacgccaggacaaagacggtgctaaaatagatgcacggattgtctgcgttagaaaccgtgccaatcgcaaggattggctggcaatcatttgtaccgacatgtcgcttagcgaagatgaaattatccgcaactacggcaagcgttgggatattgaggtttttttcaaaacttgcaaaagttatctaaaactaagtacggaatatcatggcctgtcttacgatgctttgaccgctcatgttgccatagtttttactcgctacatgcttatgtcagttgccaagcgggacgatgaagatgaacgcacgctaggcgagctgttctattgcatgattgatgagctggcggacattacttttagccattccttgcaattgattactgatgcaatgctggccagcgtaaagcaagtctttcatgccagtgaagcacaaatagctgaattcacggctgactttatcaatcgtttacccaaatacatgcaaaaattgttaaagaaaactagcaaaaataatatagaagcctaaagccaagcaagatcaagagattactggcttatttagtgtgggaagtttaagttattagtttttataattcagtaagataatcggcaaaatggtaatatttagttgtagtcgcttcaaaggataaaaagtattcaacttggattactcaagctttcttgcaatactactacctaaacagcaagtctatgcaaggtgtgattaagccactcaagcgaattgctaatagattaaataccagtctgaagaaggcaaacaacaaacgtgactttaacgctgcaatgaaagctgctaagaagttacgtggcagtcaaagagattttgttttacgttcattgaatcaacttaagaaggatggctccatgaatgtagaaggaaagaacttgttattgtttggcttataaaattaagatattaagtagtaaagctcagcagaattactgagctttatttttttgtgaacggtagtcggcaaacagtataataaacttataccaaaaacattgaagtggattatatttagaaaagaagatggaaaatggctaaaaagttacgcacgcttggtattagcgattttgtcggcagggatgctctcatttttaggaatattggatgaaacagccacgacagttacttttccaacgttaattaaagaattttcgattaccactgatcaagttcagtgggtaaacacactagtcttattggtaattgcgactatcgtaccgattagttcacagattagattaagaatttcgactaagaaaatttttattctaggagttcttttgtttactttggggctaatcatcgatattttatcaccgcgctttgatttattgttattaggacgggcaatgcaaggagtcggcacggggattggcttaccgttaatgtacaatattatcttggctgaagtacctaaagaaaaactaggctttatgatgggaatcggcactatgattactgcctgtgccgttgccttagggccagtttttggcggaatgattaccgatgcacttaattggcgctggatcttcattatttcgctatttttaatgaaaaacgcccggaaattccccgtattttaatgcggggatggatagggccaagctgacctaatggtcagctttttttattaaaaaatgaagacatatgttcgactttcctgtaaaatataaatatctaatctacagaaggaggtgaaacacatgaagagaatgagcagtttagcctaccattttggcttgaaagtacgcttttatcctagttctaaacaaaagaaaatcatcaagctaaattatgatgctcagcgttttgtctacaactcttatgtaggacgtaatcggaacaattatcgggctaagggctacttagctgttagacaatatcaagtaatgccttttgccttttctgttcttaataattatgagactaagctagcagaagaagtagtcgccaataatgagttattggctaagccaaagaacattcgcgatgcttatagctttttacgcgttaaagaaattgacagtctcgctattgccaatgcgattcaaaactatcagaaagcttggaacaactatcgcaagcttggtcatggaattccgacttttcacaaaaaacgtagtgattggtcatatcagaccaactgtcagtatcctaaacagacagaagcctttcttgataacgggacagctagatttattgatgctaagcacgttaaattgcctaagctaggcgttgtccgcattgccagctttagaaaattgattaaagagcgttttcttaatcatatcccaactagaattggcacagtcacgattaaaaagaccgctgacgaccagttttacttatcaatgcaactaggcagcgatattgcctttgttaaggaattgcctaagacgcagagtcaaattggcatcgacctcaatcttgataatttcttaacagcatctaacggagcaatggtggctaatccacgattttatcgcaaaaccaaaaagaagcttgcccatgcccaacgtgtcttgtctcgcaggcagcgcagagctaagaaagagggacgcaatttgcgcttagccaagaattatcaaaaacagcgtctagcagtcgctaaactgcacgataagattcgcagacagcgaaatgacttcttgcaagtactctcaactgcactaatcaaaaaccacgatttagtagttgccgaggaattaagaagcaagaacctgttaaagaatcatgccttgtctcaagctatttctgatgttggctggcgcagttttctgaacatgctggcatataaggcagacctatatggcaaagagttcaaaacaattgatcctaagtacaccacccaaagatgccatcaatgtggcagtattatgggacaaaacggttataagaaattaacgcttaaggatcgagaatggacttgtccaatctgtcaaacgcatcatatccgtgattggaatgcggcagtaaacatcttagaaaaaggcttaggcaactggcagaattctaaaataaaaaaagcagcctaagctaggctgcagtccgctagcaactcgcggactcaaaaggctttggtaattagacgacctctatcggcaatagtcaaaagattattgttggtaagtcaagtccgtatctaagcaagttggtgttctggttagcgcaagctaacgagccagccaccaagccccagaatttattctggggtagttgacttatcttgagtctatttacgggaagctattcaattcggcagattaatccgcttgaaaaagtgaagttcaagtatgtgcaatggctatctttggctattgggctggtctgtttaatgctgggctttacgcggattgctaaatattcatttttctcaatccgagtttggggcttcttaatcttaggaattattagtttattaatttggctcaaaatatcttggtccgataaagcagcattgattagtccgcaactgtttaaaaatttacgttttagcatgcagttaatagcttattgctttgccaaaattgcgacgctagctttgggttttatctttccaatctatgtccaagctgtcaatcatggttccgtttcattagccggttgggttacttttcccggtgcggtaattactgcgttaatggcggccttagcgggcaagctgcttgataaaaaaggcgcgcggttgccgattattataggaataattgctagtttgactagtttaattttgatgaatgttttggcaccattaagcaatcttgccattgtattgttatatgttctttattatggcggatacgggatgtgctttggcagtttaatgactagcggtttgattactttaggtaaagctagccacgcacaaggtaatgcgatttttaatacgttgcaacagttttcaggtgcactggggactgctctttagctgggactttgattgcgctagcgcagaataatcatgtaggtaatggtacagcagtcggttctaaatggacctttatgatattactaattttgataattattaagttattcttggctcttgtgtttgtaccgaagaagagataaaagaaagtcagcaaaagctgaattttttattttcctgaattgtcaaattaagtgcaacagttaggttatgaagagatatattgcttgaagagttcctctgctgtgtgatattggaggattcggcgatatttgtggttaatggcatcagttgcctgttggacataagcttttgacttgtctttcatgctcttgcccttagggaagaattgacgcaaaagaccattgcagttctcattggtgcccctttcccatggagaatatgggtgagcaaagtaaatctggcagcccttgatcttggtcatatccgcaaactcagagccattgtcaaacgtgattgatttaaaccaggcaggatgtctgtcaatctccttttgaagcagcctttggcatgtgcttgcccgatagtcaggaatcttgataactacttcaaagcgtgtggttctttcagtcaaagtcattaaagcaggctgattcttgcgtctgacgcctttaaccagatctccttcccagtgcagcggagcttttctgtcttcaacctccttaggacgctgttcaatggaattgccaagatgcttcttgtgcaaagcgtgaccgccatggctgtgatgacgcttgttcctgcgtcttttgagcttcataggcagatcaatattgcttatgtccagcaagccctgatcaatatagcgatagacggttggtgtgctgggacaagggtagcctggcatagtccttttgaattcaccaacgaactcatcgatgctggtggcatcaaatttagctttaaagcgtctggagagcattctcaaaaagacagcataatgcttcaatggattgcgctgatagcagtttttgcgacgcttctcataataaatctgtgcagtatcagcgtaatagtgctcatacaataaatagctgctgtctctttgcaggacgcttccgcatttgatttcgcgactgattgtcgacttatggcagccaacttcttgagcgataacagtacgggaagttatgccggaatccagcattgcttgaatttgtccacgttgtacgctggttaattgatgatagtgcttagaaatgctagaatttgaattggtcatgaagatcttcctttcttgatttttcgtcacttcaagtttaggtcttcatggcctttttgtttaacacttagtgttgcacttcaattttaaatccgggaattttttattttgtaaatatattaactttaaatatgtaatatttgattaatatactaaacaaaattataattattttgatcaatataattatatagaaactgtcaaatcttttgtgtaaatagatctttctcgtaaattgattttttaattatttatttaatcaaagtaggattctaaggtgtcctgaacctgaccaaagcctttatgaattcgattgaaataacggtcattgtagctcattgcctgaatgccaataaaagcatcaagcgactgttcagttggaaactctgccttaggcttagctttgcgcttgatcacattgttaaatgattcaatcatgttagtcgaataaattgaagctctgatctgcttgggatagttataaaagaccagcagatctggttctatgtctttcaagcttctgataacatggctgtaaaccttgccccatttggtatagaagtcatgcaggacagctgtggcttcttctttgtttgtctgttgatgcacctgtttgaattcgttcatgatcttttcacgatcgtcgacgcgtactttagcgcagatattgcgcatgacatgaaccaaacagcgttgaaaatgagctttaggataagtcctggccaaggctgttttcatgccaacaacaccatcagaaagaaaaagctcaacttgctttaagcctcgggatttcatgttttgaagcatatctgtccagacttcaatgttctcgctaggtgcaatgcagtagtcaatgacctccttgtgcccattaggcttgatgccaatggcaatatagactgcttcacgctcaaatgtttctcggcgcaaaggaaggtatgtcgcatccaaatagacgcagaaaaacttgtcgcttagcttgcgtttgtggtaagcctcaacctttggaatcatctgcttggaaatatttgatacctgagctggactgtaatggctgccatacatcttttcaattagatcggctatgtccctggtggtcacgcccttggagtaaagcttgataatcatgctttccaagatatccgagtgctgcttgtagtcaggcagcgtgtgctgatgaaattgaccgttgcgatcccgaggcacttgcacttcaattgggccaaattgcgtatcaactttgcggaaataagcaccatttctagagttgccagtattccagccatttctggcatagggatcatagcccagaaaggcagtcaattcagcttctaacaagttattaacagcctgttgtagctctttgcgcaataaatcatttattttgtctggattgaatagagcttgagcaaaatctttggtaaaatcattcatgaaggagttcttctttctgtatgtgtttttttgttcaaaccaatcatacgagaaaggaactcctttttctaatgtttaaagaaataaatttaaggaatcattcatccttacacaaactattttacagtctcatataggagcaaaatatgaatccagatttacttgcggcacttattcttgaaggtcaaaaaaatattaaaagtattgctatcattcctcgtgattatcattttgaagatagtttgaattatgtgttagtaggcttgcggcgggctggcaaatcaacgttattatttaaaagagcacaggatttagtagataaacaaaatgtggattggtcacaaattgtttacttgaattttgaagatgaacgactagatggttttcaattagctgattgtaataatatcttaattgcagccaatcaattaacaactaagaagcattattttttatttgatgaaattcaaaatattgctggctgggaaaaatttgctcgtcgtttagcagatcaaggtgaaagtgtttatttaaccggtagtaactctaaggtgttgggtcatgatattgttctgcggctgggtggaagatatatgaccaaatatgtggcaccttttagttttacagaatatttaactgctaaaaaaattccacatgataaattatccgtcttggatacagttaataatggccaaattcgtgctgccgcaaatgaatatctatgttatggtgggttgccagaatctattatcttaacagacaagagaaattacttaacaagtatttatcaaaatgtatttttagctgatatcattgttcgcaataagattcgtaatgaaaagacgatttcattattacttagaaaaattgccgatacagtaatgcacaaagtttcatatgcaactttgtataaaaatataaaaaatgtgattagtacggtaagtcgcaattcgattattgattatatcgattacgctaaggatgcatatttgttattttccaccaaaaattattttgctaaatttagtgagcgtgaaagcagcccaaagtattattttacagataatggcattttaaatttgttttatctggataaattgccagcattactagaaaatctagttgcgatcaagttgcataataaatatcaagagaatttattttatttaaaatctcaaaagacagggatagatattgatttttatacgcgtggtgctagttaaatcgttctagacaataagccaaattataagctaaaattgcaatttccaaccggctttgaaagcctatcagactacgtgctcgattgttctcggcattgtaataggtcagaagcgaaaagtcgctttcaattgttctgcgaatagccatcaattgatgatcattgtgctttttagctcctgtcatatttttacgatatggtgtccaaagttcgtaacccatttgttttagctgttgatgcagttctttgcctaaatagccttcgtcgccaagaagatagtaattagatggatgggtattttctatcagttcaactgtctccctggcatcatgaactgatgcctttgttacgacataatcaagaatgtaaccgtcatcgctaacaatggcatgaactttgaaaccatagaagtaaattttcttggtggccttataaccaatgttggcataaccgcgaaaaattttagcacgatagtttcgaattggttggcaaacaggtaccggaaagctgtcaatgatcaagaactgtccattcaggtcaacctttttattcatttcttgccgtatctgataaatcaattgcaatagctgacgtgaacgccgattaaaacgtgagtgtgataaacaattgaaacattcacagaatcttctttgtgattcaattcctgtcttagcttgccagataagtaaagccaaaatcagactgtccgtagttttaatttgatcaatatttcgccgatgagtaaactcagccggtgcatacaaacgataccagtgccgacaaattatcactaaatctttaaaactaacttgtaaatggtggctaaaacgcttaagcttaaggcagttcaatcagatcagactcttttctattattactatttacaagtcgagtctaacaagattggacttttttattaactaaaacgatttaactagcaccacgcgtatttttatgtaccagctagtaaaactgcaattcaagttgcatgggaagtaaatgatacgtcaaaagaacgtgaagttgggaacctaattaaattagctgataattttgatgaagttgaaaacttaataatcgttactcatggtgaagaggctgaaattcagcaaaaagataagataattcagttaatgccactatataaatttttattaatgagatagtttttcgataactcataaaatggtaatgctcaaaattttttgagcattttttataactataagatctaaagagatataaaaatggacataagatctaaagagatataaaattaaagccaacaactaaaataatgaaaataggtgaacatcaattatgtctgaaataacgaatccatttgaccctaactttggcaaagttcccaaaatatatttggggcgacaaaaaatagtagaagatatagtaagatcacttgaaagtggcaccggaccctatcaaacttcaatgatctatgggatgcgcggggttggtaaaacttcattacttgctgatattacctcaactttagaacaaaaagataactggattgttatttacttagccatgacaaatgatttgcttgccacgctcatccaaagtatttatcaagaagcagcgaatccagtaaaaaaggcgttgaacaaaattgatggtgtaaagttttcggcttttggctttgaattggaagttcatatatcaaatcctcaatctacttatcaagtgttacttgaagaaatgttaaaagttttaaaaaagcatcaccaatctttattgatagcaatagatgaggttaaagaaactcctgagattgttaatttggcgtctatctatcaaattatggtgttaaaaaagtattcaattaatatgatgatgactgggctgcctaagaatgtttctgaactccaaaataatgatgtattaacatttcttttaagaagcggtcgtgtaccattaggaccacttgatcttttcgatattaagtatcggtatcaaaaagcatttgaaagaggtaataaagagattaataatactgccttaatgaaaatgactaagctgactagaggttacgcttatgcatttcaagacttgggatatcatgtttggcaacattctactgatcaggtaacagatgaaagtattgaaaattcgatctcatcgtttaaaaatgatctgtttcgtaatgcttatatcaagattatctctgaattatcgccagtcgatcgaaaatttttattcatcatggctcataatgataaaaatgttgttaatataagtgatattcgcaagcaaatgggaaaaagttctaattatatttcgcaatatcggcagcgattaatggatagtcaggtaatcattgatgcaggatatggcaaagtggcattttctctgccattcatgaaagactttttgttagaagcagaagaattatatgaaattgataactaacgaagaaagttgctctcaaaaatagagcaactttttatttgataattagactcttcgcttttgtccaccaaatgtgtaaacaataagcagaggtaaatgataagatccaggttaacagccagattccaaagaaagttaagaatgggtggtaaatggcgtgatattgcatgttaagaccgcgccaaactaattgattccagaagacattggataaatatgcgcgataagcataagtagccaagaaatggaatacttttaaactggtttgcgaattttttctaacttgatgcaggcaaaaagctgaaatcagtgcaattactgctaaacaatagagagtcattgacggcttgtaatatggtgcattattgaagttgattggataaccgaacttgtgcaactcaacattagtccaaatgaagcaagcaataaataatatggtaattacccaccaaaacttagtgaccagctggttgtaataaccacgcaattgccatgctaagacgccatacacaccatagatgaagaatgaaataaaaatgcggtcgagtaaataccaatcatgttcatgcatgccgtgaaagacgttgtaatcatagaaccaaagccaggcaaaatagagtacgaaagtgattactgcaatccaaatgcctcgagttagattgtgtcctacatagcggcttaatccccagaagattggcatcaaaataataaactgcaacatcatcgtgttgtaccacaagtgcggggcggcattaccattaatgaattgccaatagaatgaaccaatattgttaaaatgattaacttgttgcaaccagggcatccctaatagataaatgagcgtccaccaaatagtaggtacaaaaagattagaccaatttgtctgcatatgttttgcataagaaaaactatttttttcattattagtacggattgtggtatacaaaataccaaaaataaaggctggagccgtatatttgactaaattataaaaaacgccaaaaacatcttgtgtgtgaaccggttgttctacgtccatgaccagcgacataattggctgtgagattactgcgctgcaggcgaatacttttaaataatcgccaatatcagctatttgatagcttttaaattgatctgttttcatgaacttgctctcttcttttcctaatattattgtgtcatttttttaaattaggcgaaaggataatcatgttaaaattagtttagctattttggaaatggggtcaaaatgtcagtagaaaagatcacacaaaacgcactaaaagcattgctttatgaagtagttaccaatcctaagccaggtttagtggatccagttgacgtggggtctcatcctgatatgaatgtgtatttgtttattaatagcagtttgagtttagaaaattattttcggcaagcagctaaaattggagcagattttacggggcaggatttgcggcaaatgtttgaacaattgcgtcaagctggcattgaggcagaaaaagcaatgtttaagacaacgcataatataaatacccataaaggcgcgattttttcgttagggttgtttggctgtgcaagtagctattgtgaaaataataatcaaggtgaatttgaagtgatccagcagatgactaagggcttagtaaagcacgatttaggcaagaggaatgagactgctggagaaaaacaatttttgcaatatggtaaaggtggagttagagcagaagcagaagctggttatcctttggtgagggatgtagcactgccatttttagctcaaaccgaaggtgatttgaatgttcgtttactcgatacgttgatgaaaatagttagtgcgattgaagactcgaatttaataaaaagagcgggaaatattgaggttgtttcttgggcacataatcaagcaaaaaaatatttggcattaggtggctacggtactcaagctggtaaacagtttatgttagaactaaatcagatttttaaagagaaaaattatagccttggtggcagtgcagatttattgattattacaatttttatggcgttgcagcgtgggattatttaacgcaaaaattgtctagttaagaactagacagtttttttgcttttagatttaaagagatttaaaatgaaaaatcctgttaatccgacttttggagatataccacaaattttttttaaaagataattcggataatgaaactaaaaatgtagattcaattttctatttaggtttagataccgagtattgaaaaagcattaagctattgcagatagcttaatgctttttttactatttgattagatttcttataatccaaatgcaattttgtataataatgcaccacagattccacctgcaattggtgcaaccactggtacccaactgtaatcccagtgggctgaacctttgtgtggcaaaggacataaagcataaacaattcttggacctagatctctagctggattcaaagctggtccagttggcccaccaactgccataactaaagcagtaattaagaaaccaaccccgatgttagcaatgtcttcagattgcttgaagaacatgccacgatataaaccaactgcgatgaaaagcaaaatagcagtgccaaagaattcggtaataaaaccgttgaacttactgttagccgaatcaccagtcgcaaaactggcaaaaacagcatcatcactagtggttctgccaatgtaaggccagtagacggctactaagattagttgtcccacgatggcaccaagcatttgtaccaagatgtaaggcattacttgatcccatgggaagacgcctgaacaagcctgagctaaggtaacagcagggtttaagtggttccctgaaattgaaccaaagagcatggctgggagcattactccaaacccaaaaccgaaggcgatcaagagccacccaccattggcttgaccgtcacggctattaccaccggtatcacgtagtacagaattggcaactgatccgttacctaaaacaactaaaataatcgtaccgaaaaattcggcaaaatacttcattaaccaagtatgttccataatagatactttcttctcctctagtagaaaaaataagtgaaaaatagtacaaccacaaattatactcttaactcgaaaaatagatatagttttttgtaaaaaagcaagaaaatagcattaaaaaacactaacttttaaatagttttaaattaattaaaaagatttactatttggctgcaatcatcacaattttctaattatccagcaactcaataaattagaccgttccaaatatgaacattatttaacaagccctagataatgccaaatctacttttgacaaataaatgcataatcattatattaatttcacaaatttggtatatagctttatatatacttaatacgcatggtgctagttaaatcgttttagttaataaaaaagtccaatcttgttagactcgacttgtaaatagtaataatagaaaagagtctgatctgattgaactgccttaagcttaagcgttttagccaccatttacaagttagttttaaagatttagtgataatttgtcggcactggtatcgtttgtatgcaccggctgagtttactcatcggcgaaatattgatcaaattaaaactacggacagtctgattttggctttacttatctggcaagctaagacaggaattgaatcacaaagaagattctgtgaatgtttcaattgtttatcacactcacgttttaatcggcgttcacgtcagctattgcaattgatttatcagatacggcaagaaatgaataaaaaggttgacctgaatggacatttcttgatcattgacagctttccggtacctgtttgccaaccaattcgcaactatcgtgctaaaatttttcgcggttatgccaacattggttataaggccaccaagaaaatttacttctatggtttcaaagttcatgccattgttagcgatgacggttacattcttgattatgtcgtaacaaaagcatcagttcatgatgccaaggagacagttgaactgctggaaaatgcccatccatctaattactatcttcttggcgacgaaggctatttaggcaaagaactgcatcaacagctaaaacaaatgggttacgaactttggacaccatatcgtaaaaatatgacaggagctaaaaagcacaatgatcatcaattgatggctattcgcagaacaattgaaagcgacttttcgcttctgacctattacaatgccgagaacaatcgagcacgtagtctgataggctttcaaagccggttggaaattgcaattttagcttataatttggcttattgtctagaaagatttaactagcaccacgcgtatacttaatatataactttaagcgctttcaaaatattgtggtactatacagttattcacaattaatatgcataaaaggaaagagagtagcagttaatgagaacaatatatttggtgcgacatgggcaaactttgttcaatgtgcatcataaaatacaaggtacttgtgattctcctctgacggaattagggagagcgcaggcgacagcggtgcggcagtattttttgcaaaaagaaattagttttgatgccgcattttgctcaaagcaggaaagggcaagcgatactttagaaattataactgataatcaattgtcttatacgcgactgcgtgacctgcatgaaaaatctcatggtgaatatgaaggacaagatgaattcatgttgccatggcgacgtggctttagccgtattaatgccgcaatggagccggatcaacatgttgaagaaagaatggaacgagcgatcactaaaatcattgattcaacccatgccaacgatacaattttgattgttggacatgggacggcttaaaggttatttacgcagcgagtaaatccaacttttaaagaatatgataattgcgggatagtaaaaatgtctgctgttgataataacttgaaatatttaagttatgtagcacccgctaaagatgtggttttaaataaagcagctaaaaacgaaatgttagttgtgcgttaacgaaaagagaacaagcatgaatagagataattatattttgtggtttgatcaattgcattgcgatgatgttgatttagtcggtggtaagtcatcctcattaggtgagctgacttctgaaacgaatgtcccggttccgtatggttttgcgactactgccatagcttatcgccactttatgaattattctgatttaaatccaaaaattgataaattattggccactttaactgatccagaagattctgagcaattgcatcgaatttgcaccaaaattagaaaattaattatagaagcgccgatgccaaatgatttagccttagaaattagctgtgcttacgatagcttagcccaaaagatgcaccaaaatgagccattcgttgctgtacgttctagtgcaactgccgaagacctgcctgatgctagttttgctggcgaacaagatacttatttaaatattcatggtcgtgagaatgttttgaaaaaggtgcaagaatgttacgcttctcttttcaccgaccgggcaacttattaccgaattaaacaaaactttccacaagaaaaagttgctttatcagctgcgattcaaatgatggccttttctaaagcagctggtgtgatgtttacagtcaatgtagcaactggtgatgacactaaggttatgattgaggcctcttggggactaggcgaatacgtggtgtctggaactgttacacctgataactatgtagttgataaaaatacgatgaagattgtacacaaaatggtgactaaaaagccaattgagttgatcagattgccatcgggaggaacaattgaacaaaaggtagcaccagatcaagtgaatgagcctgctttgactgatgcacaaatcattgaattagctggttatgctaaagaaattgaaaaacattatggctgctacatggatatggagtggtcacttgatcaaaatgataagttgtggttagttcaagcacgcccagaaactgtttggtcacaaaagaaaaagcaggagaaaaccgatgcaccacaagaagcaactacagaacaccgagtattgttaaaaggcttgccagcttcacctggttttgtctcaggcaaggtacatattattgatgatccaaaagatatcaatgaatttaagcagggcgaggttttggtcactctaatgacgtcgcctgattgggtgccagcaatgaaaaaggcggccgcaattattaccaataatggtggaatgacctgtcatgctgcaattgtatcacgtgaaatgcagataccttgtttagttggaacaactagccgtggacaagctgctatgaaaactttgaaaaacggcgagactgtcaccgtcgatgctaaaaatggtgtggtttatgctggagttgttaaagacgcggttaaaaaagtcgatgaaaagccagctgagcctgctgcagttgaatatttcccaccaactgcaaccagagttatgatgaacttaggagatcctgatcttgctgaaaaatatgcatctttgccagctgatgggattggtttaatgcgcgaagaatttttatggacgacttatattcaccagcatcccctttatttgattgaaactggtcatccagagagggtagttaacgagctagctaatggaatcggtaaagtcgcgcgggcaatggcaccacggccagtagttttacgtttttcagactttaagtctggcgaatatcgcaacttaaagggcggcgacaaatatgagccgcatgaaccagcagacctattaggctggcgcggtgcttctagatattatgatccaaaatatattaatgcttttaaattggaacttgaagcggtaaaaaaggtgcgcgatgagttcggattaaagaatttacatgtgatgattccattttgccgaacagtggatgaagcgcgcaaagtgacggaaatcatgcggacacaaggtttagttagaagcgcagacttcaaggtttacatgatggctgaaattccagctaatattattttggcggaccagttcaatcaatttattgatggttattcaattggttcaaatgacctaacgatgcttttactggggtgcgatcggaataatgatgtgattgctgatctttttgatgaaagaaatcttgccgtcaaaagggcgattagacacttgataaaggttgctcatcaagatggtaagacggtttcgatttgtggtcaagcaccatcagaatatccagaatttactgaatttttagtcagaagtggcattgattttgtatcagttaaccctgacatggtgaaggcgactaagctaaatgtagctcattatgagcagaggatcctccttgatcatgcaactggcttaggtaaaaaggatccaaatgaatataattgggaaaatttataatttgatgaaaagtctttgattgcagtattgcagtcaaaggcttttttagagttcaattttgtttttgggcaattttacatttaatttagtaaaagagtaaggttgaactaatgaaatttcgtaagcatctaaggctaatctctcactggcaaaatcagggttatataaaggatcgcctacaataggacttcctaaagaggcaaggtgaacgcgaatctggtgtgtacgaccagtttcaagcgtcaatttgacaatcgcagtattgtcatcatttttttgtaaaacttgataatgagtaactgctcttaatccagtaggatcgattttgcgtttgcgttgatcaagtggatcgtgaccaattggggcattaatcgtacctctttcagctaagtgatcagcattgataactttagctaaataatcgcggtgaaaaattttgctggttaattcacgatttaaaataggtacaactgcaggatttttagcaattaaaagtaaaccaccagttaacatatctaatcgatgaacaatatagggactctgaccaagataagtagtacaatcgttcagagcagtattagtttcatttagattagggtgcgttttttgcccttttttcttattaataattaaaagattatcatcttcatagataacatcgggcatcttaccgcttggtgcataagcctgttgatcactttcaacatgatccaagttaatttcaattttatcaccaggtaaaatgttttgattaaaatagcgatagttgccgttaactaaaatattttgttcaattcgcaaaaaatgacgccacttgcgagggattaaaagttgacgtagtacttcattgacagatgccggagcaagattttctgggtaaaaaagtgtaaaatggaaactcataataatttcttaagtctaatctagttataaacacgtgttttgatagtatggtacaattttcttgtttctaaaaaggagcaatatttaatgaataacgaccaaccaagaagaggtggctttaaagatgcttggcatcgatttgatagtcgcttctttatcggacgctggattattttaatcctgctcacattgatgctcttaacttgtacctattatacaattaaagttaagacatcaaacatagctaatttgaaggcctcgctttcaaccacaactacaatctatgactacaagggcaaaaaagcaggttctttatactcgcaaaagggatcatttgtggaatatgaccagatttcgcctaatattcaaaatgccgtaatttcgactgaagatcggactttttggaagaacccaggttttagtattaaaggcatggtgcgagctgctttaagtttagtgattcatcacggtcaagtaactggtggtggttcgaccttaactcagcagttagccaagaactcgcttttgacccagcagcagactttttcaagaaaattggaagaactcttttttgcaattgaaattaaccatgtttactccaaaaaagatattttaacgatgtacttgaataatgcttactttggtaacggagtttggggcgtgcaagatgcaagtcgtcgctattttggcaaaaacgcaagtgaacttaatccgagtgaagccgcaactttagctggaattttacgaaatcctagtttttataatccggttgatcacatgtcaaatgctttagcaagacgaaatttaatcttaaacttgatggtggataataataagttgacagcggctcaagctaaaatgtatcaaaagcaaggattaactttgcggaatacttttcaaaataaaaacggctatcgctatccttacttctttgatgctgtagttgacgaggcaatctctaaatatggcttaactgaagaacaagtcatgaataaggggcttaaaatttatactactttaaatcaaaattatcagggtaaattgcaggatacttttgagcaaagctggcttttcccacaaaatggtagtgatggaactgaaagccaaggcgctagcgtggcaatggacccaagtactggtgctgttcgggcaatcatcggtggtcgcggtaagcacgtcttccggggttacaatcgtgcaacgcagatgaagcggcagccagggtcatcaatcaagccgttggcagtatatgccccagctttacaaaatggctatcactatgactcgcaactatcgaacaagttgcagaaatttggtaaaaatggctatgaaccgcataatgtggataatggctattctaatacaattccaatgtatgaagctttagaacaaagtaaaaatgtgccagctgtttggctattggataagattggtgtaagtaaaggcgtgcaatctgttgaaaactttgaaattaaggtaccaaagagtgaccgtaatttagcgcttgccttaggtggattatcttcaggtgtttcgccaattcagatggcacgtgcatattcagcttttgccaacaagggtaatttgcctaataattctttctttattaccaaaattactgatgcttcgggtaacgttttagccgaaaataataatccaagcagccaccgcgttatttctgaaaatactgctaaagaaatgacgactatgatgctcggcgttttcactaatggtacaggacgctctgctcagccaaatggcttccgtgtagctgggaagactgggtcaactgaagtacctaactcatatggatttggtaccaaggaccagtggatcgtcggttatacgcctgacattgtacttgctacctgggttggttttgaccgcactaacaagcaacactacatgcagggcatttctgaaacaggaattacgcgtttatataaggctgagatggaaggaattttgccgtacaccgcgcaaactgaattcacggagaaggcacctaaccagattgtgaagaataatggttctaatgatgactggactaatggattaggtgaaaaaattcaagatggactcggttctgcaggacagaaaatcaatgaatggtataatagctttaaaggcttatttggccaataaaatttaggaggactagatggttaacatttacgatgctgctaacaagttagcagaagatttgactcaaactgatcaatacaagaagttgcaagaagcaattaaagctgttgaagatgataaggatgcttcagctttattcaaaaagatggatgaattgcaaaataagatcatgcaagcacaacaagctggtcaaccactttcagctgaagatcaacaagcttacaaggacttaaatgatcaagttcaaaagaatgataaaattgtttcacttcttacgaatgaacaggggttgtacgatttgcttggtgaagtacaaaaagcttacactaagccaattaatgatctttatgaagatcttagaaattaatattcgcgatgaaatttattcactttgcggatgcgcacttagatagtccatttcgtgggctatcttttttgccatctgaggaatttaaccatatctatcagtcagctgatcagtcgctaaaaagaattatcgacctagcattagctgaaaaagttgatttagttttaatagcaggggatacctttgatagcagtcagccgtcaccacgggctcagttgttttttgctgcgcaagtgaagagattaactgatgcacaaattcaggtagtgatgatttttggtaatcatgaccacatgaagcaagaagatctgctagttagtcccagtccttactttaaattgttaggcaatagtgaaacagtagagcaagctacttttactacggatgcgggttttaactatgacgtaatcggcttttcatatctgaataaccatatcactgaggataaaatcccagaatttccagcaaaaggaaaaaattatacttttggtttaatgcatgctcaagagaaatcagctactgctagtcagaatgtgtatgcaccgtttacagttgatgagttgcaaaacttgaattatgactattttgctttgggtcatattcatgcgagaaataatttaagtagtacgccgtggattgtttatccaggtaacattcaaggtcgccacattaatgagatgggagccaagggatgctatctaggtgagattgatggaaatagtggtaagactactattgattttaaagaaacagggccaattttatggcaagggacaaaaattaatcttgaaggagctatcagtaaagctgacttacaagcaaaaattattgccaagcttgaatctggacaaaaaacgtactttagtttgacgattgctggtgctcaatatttgagtgccgaagaacgcgatttagttcaggatcctgatttttggcaaactatttctcaatcgctgccatttgcttctcagttagttgatgtgcgctttgttgtgaatactagtttaaagttaaatgacaatgaccaacaagccttccaagctgccaaagaagagttatttgcaccagctgaattcaagcaaattgttagtgactggcaaaaaaaggatccagaagctgctaaattagcggctgatccagactttattgcggcggttaagaatctaacagaagtaaaactaatgagtaaattgaaaggaattaaggatgagactgaaacaaattaagattattaactttgggcagttctcgaataaaaccttcgatttgcctagtgatcaaattaatgttttctttggtgccaatgaagctggtaaaagtacaacggtagcttttattaaacagatcttatttggctttcatttgagaagtaactcttcaccgttttttgaagattatacgccgctagctcatgttagtccgatgggcggtaatttagtttttactgcagctgatggtgaatacgaacttgagcgactctatgctaaaggtgacaagactaaaaagggaattttaaccgtcaaaaaagatggtcaagttgtacctgagagtgtattttttgatcagattcaaaatattgatggctctttttacgctgatagttttatttttaaccaagaaatgctgggtcaggttaacagtttaagtcaagaggatttgcttgagcgaatttattacttgggagcagcagattctagcaagttgctggaaatgcgcgacgattttgccaaagaaacgggtaagctttttaaaaagacaggtaaaaagcccgaagtaaaccgtctgcttaaggaaatgactgatcaacgtgataaattagcgcagactaaaaatgagtttaatgattatgaacagctgcaccaagattttgtacaaaaaagagcggcattaaacagacaaaaacaagatctggctgttttacaaaaacaagaacaagatttgcatgatttgcaaaaagaaatgggcaattatcagacgctgcttgatttgcaaaaacaggtcaaggatgtcgactttaatggtcaaaattatcaaaaagcccaagatattatggctcagggacgtaatttgcaaaagacgattcaatcggtagaagcgcagttgcagggcctgggtgaaaacgatcagtctgattttacgctagagaagaagctaatccagcagaagcctcaactcttgcagtggcaagcggaatatcgtaattgtttgcaaaaggctgaccaattgaagcaggagaaagagcaactattagctttgacacctgagttaaaaaatctactcaagttgacaccagagcaaattgaacaaatgcaggcagactatcaagctttgccaggtgctgtcaatgagcctgcttatgtaactactaatgacaagctttggtatgttatcggtgcagtgttagcggcattaggtgtagttcttttggtagcgttgggtacagttggtgtaattgcattaattactggactaattttcctagcagcaggatacttaaaaaatagtaaccaaaataagcaaaatgcggcagtattagaaaagcaaaagctggttgctcaaaaacgccaagctttccaaacaaaatatggattgaatcctgatacgctaaacttaaatagcttactaactaatctgaaccaatatcaaatcaaaaagaatgccgcacagactaataataagcaagtaactgttttgaatcagaatgtggctcaactggcctcaagtgtccaaaatgcattgaagcaaccgattgataatgactttagtcaagttttgaacggtttggacgaacttgagacacaaattagtgaaaaacaagaattgcttcaaagaaaatccagcttaactgcatcactaaagcaggacaagcaagatttgaaagaattgggtctgaaattacaggcactttttgcccaagctaatgtggaaaatatggcaggttacgatcagctttatcaagattcacttaatcaggctaaactgaagacgcagattgcggccttgaaggaatcgttaggcgatgatcttcaacagctgcaaatgcagacaaattcaaccgaattagcagataaattaacggctttgactgaacaaattagtactaagaatgcagaaattaatgaacttcagagtcaagttgctcagttgcaagtgcagttagacaatttagctgattctactgcggtgtttaaggctaagcaggatctggctaatacagaaaccaattttgtccagagcagtaaagaatacttggctaacttgtttgcggcaaggtggatcagtcgctcgcttgacttggcatctaatgaacggttccccaagatgcttaaggcggctcaggaatacttagctttgctaacgggcggcagatatgttgggattaatttagataagaagctaacagtagtcagaagtgatggtaaaaagcgcgaagtaaaatacttgtcacgggggactgctgagcaattatactttgccttgaagttagcttttattgagcagatcaaggatgaaattaatttgccaatcttgattgatgattcgtttgtaaactttgatgatcagcgagtcagctatatcgatcagttattgcaaaagattagcgaaaacaatcaagttttaattttcacagctcaaaagaatttagttgatcagcttgggattgagccattaacttttacgaaaggaacacaggatgcttaagagattgttagattacaacgatggagaagaaatggacattgttgttttgattagaaactcacagttgcgtcataataaaaagaataagttgtttttagcgatgcaattcagtgatggctcaggcgagattcgcggtaattactgggatgctaacaatcaagatgcagcaactttttcaactgggacaatcgttgagttgaatggcaaaagagaagaatatcagggtcgcccccagattaggatctattctctgcgcgtggtcggtccacaagaaggctatgaattagatcaatttattaaatcagcgccggaaccagttaatgagatggaagctgaaattaataaatttgtgatgcagattgataatccgacctggacaaaaattgtgaagtatttacttcaaaaatggcatgatcgtttttatgatcatcctgctggtaaaagcaaccaccatgcggtccgcggaggtttagcttttcatactttatcgatgcttaaggatgccaaaggtttggctgataattatgagcaagtgaatagatcgctactttatgcgggatgtattttgcatgatatgggaaaagtactggaactttcaggttctgccgcaactcaatacacgactgaaggcaatttggttgggcatctggttttaattgatgaacaaattatgctggccgctcaggatatgaagatgaatctggagtcggaagatttactcttattgcggcatatggtgcttagtcaccatggccgctttgaatatggttcacccaaattgccggcattgctagaagcggaattattgcaccgaattgatgatttagatgctgcaatttatgcagtaacgaatgccctgcagcatacgcctaaaggcgagttcaccgagccactactgagtcaagatggcaagcgatattatcgaccgatgcacgattcagcgctagataacgcaaaacatttagaataagaaataagcatcactgcagttgatttgcagggatgcttattttgttgaaaaattgaactagagttttattataatttcatagtataataaatctaatttataggggagtaaaaaggatggatattgctgaaattactaaaatgattgaggcggttaaacaaataatagaaaagaatgattacattgatttgccgctatttcagaattctagtcaattaaggttaaaaggaaataattataattttatacttgatttgaatagaaaaggacatagacgtcctaaatgtacttttctattaagggaaaagagaaataaggaacagccattagttagagtagatattattggacgtcctcatcaaaatcctgttggagactttaaatggtcaaataaagtcattccttgtcctcatttgcatagagcggattttccaaaatatggtacatatgtagctgtaccacttttggaaaagaatgaaaattttcaattgagtcagaatgatttaaataacttgtgtgaatgcttgaagaagacattaaagtttttgaatgttgataatataaattcatataattttcgagaacaggaaagtttattttaaagaaaggggggagaacagttaaatatgtttgatgtagagaaaatgaagaaaatatattttgactggatagataaaaagattcaatttgtcccttctaaaaatcaggattatatgactatcactacaccttttttagatatgtacaatgattatatagaattagtgattgcacaaggaaatacatcaaaatatataattagtgatgatgggtatactattaatgagttagggttattagatattaatttaaacagaaaatctaaacgtagggactactttcaatcgattttgattaattttggtgtgaaaaatcagaataatgaattagtaattgaatttgatgacttagcccaatttccagatgcacaaaataggttaactcaatgtatgttgcaagcttttgatttattacagacttctaaaaatagtgttattaagtattttaaagaagatgtaacaaattattttattgataataatattccagtaggagaagatttgagtttactaggaaaaagcggacggaattctaagtttgatattgtggttggacgtacaagaaaaaaaccgcaacaagctattaaggtggtgaatacgcctattaattctaatatagctaaccctttatttagaattattgatgtacgagaaagccaacctaaaacagaattttcagttattgcgaacaatattaatagtcctgtttctagtgattttaagtctgcctttaagaactataatattcctgtttattcttggtcagaaagagagcaatggctttccaaatttaaattggcaatgtgatagttgattaaaggtgttgagctgaaattgtaaataatattagttctagcattaggcaatatggaacatttagaataagaaataagcatcactgcggttgatttgcagggatgcttattttgttttggtgaaaaattgtgtcaataattttttgaacaaagttattgacaaattagctgaagaataataacatgtttatacaattgaaaagcagagatgtttttggatagattagagacttgtctcctttctatttttttattgataaaaagttcaagaggtatacattgatttcctcttggacttttttgatgcattgaattgctaaagatgttataaaaattagggtagggaataaaaatgaaagcatcaaaaaaattaattttagtatcggcagctacgataatgttgactgtacctgttttagcaaataatcatttgtctaatccagttgttgccgcaagtcaagataatacacaaactactaaattaacgttctatattaaccacaatgcctatgtttacaatcatcaaggtaagcgtaccaagagcaagattaagaagggaaagttactaaaggtgactatattgaagcctaaggcaattactaacccaaatcaaagcaggtatttcttcaataatgtattagctggcaagtatttttcgttaccgacagtaagcatcaagaagacagactttgttaatattggcaaaaataaatatattaagccaggcaacattggtagaatctcgccaggaaaatatcaatatgcggatctgtcaactaaggaaattaaggtaattaccaaaaagactgctccagtaactaatcaaatagggatgccaattgctgctccaattaagaagggaactaagcttacagttgatcagaactattatcataatgttgacggcgctgatgattatttgagtagtctggaatattatcggattaaaggtactgataagtgggtcaacctacctgatatcaaaaagtcaactcggattatgccaaataattttgcattagctgcatctactgaagataattatgtcattgccggtaactcaacgtatctctataatattgacggtgaaatcgttgataagagttatttattgattacagatgttaatgttggcgttgatcgagctctttatatttggaacaagcaaactaaacaagctgatctatattatcatcttacggctaacaaaaaattggtctgggttccagctcttgatggaacaggcaagactggtactacgattaccagcaacggctcatatgctcaccaaactaaagatacagcaaatacttttgttaaagctagtgatgtgacaagtcaaaatccagttgcattaaaagttgataatacaccgagcgaagcacaagcagatgcaactcaggccactgctagtgactatggtgagttgcaagccttagttgatcgagcaggtcaaattaaaaaatcgactttatatcgtttgactgaaaaagcacagcaagaaagatatgatttggccgttgataacgcacaaaagttattgactaacaagaatacttctattgcggcagttaagcaggctagttggcaaattaaatacgatcaaagtaaattagacggacaaaaagtttgggttaaaaacatgaataaactaactaaggcagaaaagtcttgggtagtttcattggctaattgtgatatccatggtgatttacaaaaagaatatgctggcttttataaaggtaaaattgcggtagtgacttataataaaaagactttcaagagtgaacttgtacgctacttgaagttgtctgattatgctactgataaataaaattaaagagctcaagaatgctttaatgatgaagcatcttgagccttttgatttttagtaaaaaaatatccaagactgaaatcttggatactcattggagctggaactgtgcttgatgaggcaactgctagaatggcgattgtttcaggagctagattcgttgttagcccatcttttaacgaaaatactgctaaggaatgcaatctgtatgcggttccttacatgcccggttgctttagtccaacggaaattcaatctgctttaacttatggtgctgacgtagtcaaaatcttcccaggttcaattgctggtaaaggcattatttctgaaattcatggacctttcccatatgttaatgtaatgccaagtggtggtgtatcattaggaaatatgcatgaatggtttgctagtggtgcctatgttgttggtgtaggtggcggattagttggacctgctaaaaatgatgattataaagctgtattgcataatgctcaagcttttcataatgaatttcaaagtattatttatgccaactcagctgctactagaaaggtgccagtgagggcatagttttttttggggggaatatgatgcccctatttaaaaaataaattaatgaaataaaaaaacgtcgaatccattcagattcggcgtttttgattaactaaatatatttgttacttagtagttgaaacgtatgatgataatacatccttcaagtcgctatccttgattgaaacgtcagccttcttcaaaacagtagcaataacgtctttcatagtagcttggtcttgagccattgatgcgtaaatttgatcatcaatagccttcttgtggtcagcaaacttacccttagctgggtggctgatcatcttgattacgtggtaaccagattgtgacttaactggagttgaagtaacttcaccagtcttaagcttgaatgctgcagtcttgaatgagctgtctaaagtagtgtcagttgagtcgaatgatggcaacttaccagccttgttcttagtagcagtatcaagtgagtacttcttagctaaaaccttgaagctcttgccatctttcaattgcttgatgatgctttgagcagttgacttcttagcaaccaagatgtgttgaacagttaccttaggttgatagctcttccaagcttgttgttcttgcttcttagtaactttcttaatgtgcttcaatgcttgttcagaaagaaggttagtcttaatgttttgcttgaagcttgaagcagtcataccattttgttgtaaaacagcactaaattgtgagccgtattgcttcttgtagttgttgtattgcttgtcgactttcttttgagatacgtacttgccgtattgttgttccaaagcgcgattgatgatcatgttagccaaagttgacttaccggcttgtgacttcttcatttcatcatagtattgttcttgagtaatcttgccacccttgtatgaagcaacagtagctttagtgccgctattagaacaagcagcagttgataatgcaacgccagctacagctacgactgcagcaatttttttcatataactcttcataaaaataatatctccacatccttaaataagtaactgttcattaatataccataaaaaagggcgtttcgttttcaaattacgaattttcacagaaaaatcaaattttctttattttttcttagttctttgtgtcttgtgagttagtatctggcacgatgttttccaaatcttggttcaatttatcgctctttttttctatgcggttaacgataggttgaatatggtcggaataatgttcaacactatcattaatatcactaattgtacgttcagctgttggcatttgttcatttaattcttgactagcctttttagctttttgcaaggcagaattaaagcgttggctttcatgtttaattgcttcgaactcatcttttaatggcttgcctgggcgattaccattgctatctttcatacaggaaaaaactagcccagctgttgcaccaaaaactgtgcctaataagaaatgtttcatttttaacctctaaaattgtgccttaattttgttagcaacttcgttgtatttagcttcatcgtatttgtcagcgttgttgcgggtcatcagcttcaagccatcgccttcaaaacgaggaatgaagtgaatgtgtgagtgcataactacttgatttgcggccttaccattattagtagtaatgttcattgcagtaacattagggaaggctgccttaattgcattagcaatttcaggaatatattgtaaatagcgttgtgcgtcttccttggtgtagtcaaacaagttaacgatgtgcttttttggcaccattaaggtgtggcctgggttaacttgagaaatatctaagaaggccttaacatcgtcattttcaaaaacggtatagctaggaatttcaccgcggataattttgcagaataaacaatctttgtctaaattttccataataaaacctcatatccttgtactttagtttactattaaatccatgctatcataataaaggtataaattcagtaaagaaagataggaaaaatgacattaaaaattgaacatttaacgggaggctacacgggtgtcccggttattaaagatattaatttggaaattaagccgggtgaggcactaggcttgattgggctaaacggcgcggggaagtcaactacgattaaacatattttgggtttacttcgcccgcaaaagggtaagatcagcttgaacgatgttgtattgacgcggcaaccaactaagtttaagcgtgaagtagcttatattccagaaacaccgattttgtatccggaattgactttaaaggaacatttggagctaaccatgttgagttaccacttggatgaaaataaagcatggaaacgcgcacatgagctgcttaagatgttcagacttgatgacaagctagaatggctgccgattcacttctctaaggggatgcgccagaaagtaatgattgtctctgcctttttagcagatactagtttgcttgtaattgatgaaccatttactggccttgatcctttggcagttgctaacttaatcgatttaataaaaaaagcaattgctgacaaaaagatggtcttaatgactactcacgttttagctgatgcacagcaagcgatttcgaattatgctgtgttaaaccgcggcacgatcgaagttgtggggagtttgcaagaaattcgtcagcactatggccttaagccagatgatccttttgacaagttataccttgctttgaatagagaggataatggcaatgcgtgagttagcgaatagaaggttgagcgagaatcttaaacaatcagtaaaatatttgacgctggtgtttaatgacttctttattttagcgttgatctttttgtttggggcgctgatgttctggtatgcccaagctatgcgcgtaattcccaataatctgtggttctataagccacttgtcggctttatcatgtggttgccattattagctggtcgattagttaccttattaaaagaggccgacatgcaatttctgtttacgcaagatgaacaaatgggtgaatatctgaagccgatgattcgttacagtatggtgctgccaacaattctgattgttttgcttggcggaattctgtttccgtttgcgacggtaaaggctggaatcccagtttggtcatatgtaatcctgattatcagcactgttttattaaaattgtgtatgttgctgattgaaaaagagagtttgtacttctactacaattatccgcaatggatattattagtggtaactctggcggctttgttgattggctcactaggatcatttatttatccaattgaagttgtagtattaatggtaattacgcattttggtactaaaaaagaaaagggcgtctttaactggcgctatgcgattaaaactgaacaagctagaaaagatcgcgtttattcaatcttcagtatgtttaccgatgtggcagaaaagcaagttacaatcaaacgcagaagatacctcgactttcttttaccaaaatcattggctaaggaaaatcctaatttgttcttgtatcggagatcacttttgcgtaatccagaatacttgaacttattagtcagaatgactgtctttgcaatcttggtatcgtggttagtgcaagattggcgttgggcactaggcctttcatgcttggtaatctttttaacggtctatcaattattgccaatggcaacagaatttgaccgcaacttcatgtaccgcgtttacccaattgaacggcaaaatcgtggcagggacttggtaaaggtgttgacaatgggcttgtttattcaatggctcttgattagtgtctgctggttaattgtgctaccaattaatgttaacttgtttgaagcgatggcaattttacttggtttcactatgattgtaactgccacttacttgccaggcagagttaaaaaaatgaatcaaaaaaattttggaattagataggaatagagaatgagattaagaaataaaccttgggctgttaagcttgtaaacgaccatccagaaagtgttttgcaaaatcctgatcctgaaaaaaagatcgactggactgaacgatttggtaatgatcatcccatcgaaattgaagtaggttctggtaagggacatttcattactacgttagctgaacaaaatcctgataaaaattatgtcgcattagaattgcaaactacggctgcggggattatcttgcgaacaaagttggaaaagggcttggataatttacaaatcttacgcggggatgcggctgacatcaactgcttctttccagcaaatagcaccaatgttatctacttgaattttagcgatccatggccaaagactcgtcatgaaaagcgtcgtttgacttacaagagttttttgagcaagtatgaacaagttctgaagccagaaggacatattgaatttaaaaccgacaatgcgggcttgtatgcttactctgttcagagcttgaataattatggaatgaagtttgattttgtttcagttgatcttcatcatgaaaagccagagattgtggaaaagaatattgaaacagaatacgagcataaatttgcagctaagggtaatccaatttatgctttgcacgctcattttgaggatgaatagtttgaagcgtctagagttacagcagataaactctaggcgttttttaatgctttattggataaaatcttgctactagctcatcgctttagttattttgttttagaatagaactgtaagatttcagattattggagggaaaattatggaagataaaccttattatgaacaagaatatcacgaacctaaaactgatattcctagaccaacttttggacaagcattcaaacttttgtttactgcaccatttaagtagaatgcacgtagtactcgtcgtggattttggtatgcctatgtttgggcaattattttgctagtcattttagcagcatgttcagctacggcatattcaattgatggcattgcttattaaagtaatgaattcttcttattaacgcacgtttcaactggtacacttattattcaaataattatctatctactgattatttggatcttattgggcttacttggctttaccataagaagattgcatgatactgaccacaccggttggtggtactggatctcggttattccatttggttatttgtttttactttacttcatggttttgccaactgttgaaaaaccagttcgttggggcagttatctatttaaagaaaagaaataattgtaagactcaatttctagctttttagttaaagaatggttataataatatcaacttataaaaagtaagaaatgcatgaggtgtgaaaaatggaaaagattaaagaattaactgaagatcaattaaaggaaattactaaagaaggacgtactgtgcttgaattctcagctgattggtgcccagactgcaagtttcttgctccatttatgcctgaaattgaaaaagatttttctgatgcaaaattctacgaaattgaccgcgacggttcaattgacatagcaaaaaaattaatgattatgggaattccttcatttgttgtctaccaagatggcaaagaaattggtagactagtaaataaggaccgtaaaactaaagatgaagtggaaaactttttacgatcacttgactaatagaggagaataaaaaagcatgattactagtactaataaagaagcttatcctaacactttgatcgttatcttaggtcacgatgaaggccgtagctcatttgaggaaaaagaagacgttactcgcgtaactaacgatgaaggcaagaccattggttacaacttcttcaacgttgataagttagttgactttgataagttaccaaatggtccagttaagttgtcagacgatgagcttgttgcactgaacaagaagcttgatgaagttggttttactgacaagttagcatatggcaagccaactttagtttatggctacgttaagacttgtgaaccacaccctgattcagatcacttgcacgtaactactgttgaggttgctgatggtgaagaacaccaaatcgtttgtggtgcaccaaatatcgctcaaggtcaaaaagtagttgttgcacttccaggtactttaatgccaaatggtgcacaaatttggccaggtgaattgcgcggtgttgattcatacggcatgatttgttcagctcgtgaattaggtttgccacacgcaccacaaaagcgcgggatcatggttgttcctgatagcttcgaagttggtgcagaatttgaaccaactaagtgtgatgaattgattgctagtggtgaaattactttataattttaaataaattagaaaaactccttagttacgaaaactagggagttttttggttagctctgccacaatttaccatctggagcaaggttgaatgagccaagtttttttgatattaatttattgctaagatctttgctacaagtatagtaaacgtatttaatgaaatcgccattgtcgttatagcgttcttcataatcactcaaatatagctgatgatttttcatgaacagtggaatctgatcttcagtataggtgattgcaaatttgtctggaaaataccctttaactgtgcagcctttggtatctgtcccttgatcgttatcactgactaattgcacactgtcgtcgctggaaattaaacgtaaattatgcaaattaacagcatttaacgaacaagtgaaaataacttttgcttctttttctggttgatatttaaaaatatgcaattcatttgatttagtatttacttgagtaaaatagaaaaagccatcattaaaaattggttcgccgtagcacacgttaggttggactgaaaatggtgaaaaagccttactggtcttttgatcaaagaagattaagcgattgccaggataaatgcgagtttgccaataatcgtcacgcagatcttcaaattgtacataatcagaaatcgttacccaatattgatcttgaccggctaatggtctttgatcacaccaataaggcaagatgaaactatcattaactttttgccatttatcattagatagcaaaatgatatttccttgcatgtcgcttagaatattatcatcgaagtccttgatgataattcgatcagggacatgttcatagtcattatctgaataaaaatcgctatcttgttcaaaatagagtttagtgtcattaatgaagagcaaagtttgatcaggttcattaactactgaaaatttttgtgggtaataaaagttgatgttatcatcaaaagaagcaatccagacgtgtgccttatcgtaaaccaatgataaattatgagtgtgtaaaccagtaagtggcatttgatggatgatttcaggttcttgtccaggtaaatacttaaataaggttagttgattttgtttaagtaatgcatgtagaaaatagaaataaccatattgatagatcacgctaaagaaaaattgattttctttacttgaaattggttcaaatttttgtccagtttgaaagtcaaagaagactaactgattgcctggaaagggatgcttttgccagtatttttcagtagttaaatcgtaaatatcgattgcactatcctgacaatcgacaccgtagcgtgattgtccttgaatgattgttaaatcattgccggttacaggagaaaatttatcgaatttcattgatgcgtacctttctgtaatttttcaaaattatatcacagaaacaatggtaaaatagttaacgaataaaaacgttgaaatttcgagggacaaataatgttagataaaaataaacaaatttggttcattggtatcaaaggtacagggatggcatcccttgccttgcttttacatgacttaggctatgatgtagcaggtagtgacattgaaaaatatacctttacgcaagtgccacttgaaaatgtgggcattgatgttaaaaactttaacccggataacatcaagagtaatgatgaacaagtaattgttaaagggaatgcttttaaagaagataacccagaagttaaagcttgtttggacaaagatgtcaaatggcaatcttacccagatactgttgaagaaattgtccaaatgcatacttcaattggtatttcaggtactcatggcaagacttcaactactagtctcttatcacatgtattaggtgaagttgccccaacttcttacttaatcggcgatggtcgcggcaaaggtgtggcagattcgcgtttctttgtttatgaagctgatgaatatcgtcgtcactttttggcatatcatccagattaccaaatcatgactaatattgactttgatcatccagattactttaaagaccaagctgattacaccagtgcttttcaatcagcagctgatcaaactaagaaggcgctctttgtttggggcgatgacaagcgtcttcagagtcttaagaccgatattccaaaatacacttatggctttaacgatactgatgacttccaggctactcaaattcagaagtccactactggttctaagttccatgttttagcacatggtaaagatttaggtgaatttgaaattcacttatttggtgatcacagcatcttgaactcaactgctgttattgcggttgcttacactgaaaaagtgccgatggatgacattcgtgaagggatgttgacctttaagggtgctaagcggagatttagtgaaaaagactttggcgatattgcagtaatcgatgattatgctcaccacccaaccgaaatgcgtgcaactattcaagctgctcgtcaaaagttcccagataaaaagttggttgttgttttccaaccacatactttctcaagaactaagaagtatcaaaaagacttcgaagaaatcttgcgtgacgttgataaagcttacgtaactccaatctatgcttcagctcgtgaagctaacggtgatatttcaagtgaagacttggttaagaatattcctggctcagaagtaattgacttagacaatattgctgacttgactaagaataagaattcagtcattgtctttatgggtgcaggtgatattcctaaatatgaagatgcttttgaaaagttgctttaattgaaagataagcatgaaaaaaactgttctcaataagagagcagtttttattttggctaatctttgattttatctttaagatccagactcttttcgtaaatgaagtaaccaatgatacaagtgattacatcactgactgcttgagcccaaacaataccatgataaccaaatacatctttcatgatttctagtgcgatgaaatagacaacgccttggcgaacgatggccatgataaacgctgcccatgcattaccaactgattggaagacggtagtgtaaactaaaatgataccaacgattggtgtggtaataatagtggcaattaacatataactaccagcgttgatgatatctggttgattcataaatagagcggtgactggacgagcaaataaaattaataatccgcctgaaattacagcataaacaatttgcacaagaatatcgaagtttagaattttctttaatcgtttccagtttttagcaccatagttgtaaccaattaaaggttgtgaaccaaaggcaaaaccaacgattaccaagataacgatactgtaaatcttttgggtgattcccattgcggcaactttgtttgcaccgtatagggctaaagatgagttaagaagtgccataccaaagctttgagcgaagttggtgattgaaccggggatgccgattgctacgatatctttgattgttttgccgctaattttgctatattttagctttaatttgatgtagtcagttttgtataaaacgtagtaaatgagaatagcatcagtgactagataacctgtaacgttggcaatcccaacaccgattgcacccattttgaaaacaaacaagaaaataggatcaaggatgatagctaaaatggttcccgtcattgtagcaaccattgcttgggtagctaaaccttctgttctgattaagttctgcggaatgattgagaagataattggcgcagcaccaattgatattacacgataaaaatcggcagcatcttgataggtggcagcttttgctcctaaaagatgaaggatcggattttccaaaattagtaaaatggctgttagtattaaaccagtaacaaatccaccgatcatacaaaaactgcttacacgtttacttaattgataatttctttcaccgaatagccgtgaaattagtgaagatccaccgagcccaaaaatgtcagaaacagcgattaaaaaagtaaaaagtggagcaccaatcgtaattcctgctactagatttgtatcacccgttttggcaacaaacatcgtgtctgccaagttgtagatcatggtagtgatcatccctaagacgaccggtaatgctagcttaaagtagacctttttaatcggcgctttagcaaataattcatccataaattttcccccacattgaaaaaagcgacctagaaagatactttgaggtaaacctcactattctaggtcgctacgttatatcatttatttaattttagcatattgtgttaatttgtgaggtgattatctaaattaaagttaccttgaaattcatcagtagtgctttcttgatccataccatattcagcatcgtcgccccagtaaatgtattgtgaatttttgcccttggtaccggcaattctgaagtaaagtgcagcgctgtcgcctttaccagtggtcttggtggcatctaccttaactttttgaccaatcttgagcaacttgctagttgacttgagcttattatttaaaacgtggatcttgtttaaaatagtggctgtagtggtgctagaagcttggtaaagagtgttgccgttaacaaaaccaacatttgaagcataaatataagcaccgttgcctaaagcagaaaatggcttgcccttgatagtggttgtattcaaacttctcttcttagatccgctaagatttgcaaagtagaaaaatacgtcattcttagttgtggcgtggattttagctggcgttttaactagcatatatttaggaataagcgacataccgttgaaagtagtgcggtgaccgtttttatcataaatgcgagagttggaactcaagattaaaacattttgcccatccattgagctaacattcaaagatttgatgtagcgttttttaccgatgttaacgtaagaagcggtagtgtagtggtagttcttagaagtttttgcatctacttttttaccttggatcaggataggtttgccataatatttaaaacttgagcctgatttaaccgttgaagcaacagtcatcttcttgccattgactttttgggtagtggtagtggcattgcctttgctgttgaagacttgaactgtgccgttaaaggatttcttgagagtaactttacctttttgtgattgcgtagctgcttgaactgtgtgaacaggttgattgataatggcagctgctggtgcaacactgattaataaagctgctgcgatagttgctaattttttagtagtcatattttgtctgctatataaaacatggaaatatgtagaagaatacgaatttcctacatatcagaaagatatatttttcctttctttgtttcatttactgtcgtcttcactagtattctgatattccaaataggagtaatcacattgactagctcttacagcttaaggacctagcaagccctgtttattttctttattttgccaaagctaaaagatttaaaaccgcattttcatctcgatcattcttgtagccacactcataacagacatactcattatgtttggtaccatgctttttattgccctgcaaagtgatcttttcctcgccttttttgacataaccgcacgcagcacatctttgagttgatgggtatgttttatcagccgagattaattatttgccataccaatcacacttataagttagtattcgtctaaacttgctaaaaagtgatctctacattccttttgaagctacatgcgtcatcatcatttctttgactgccaaatcttcaattacaatttgatcgtaattattaacaagcttagtagtaaatttttgtaatagatcgttttgaatattagctgctttgcgataatctctttgcagtttggttctcactgcaaagtaattatttgattttgtagctaacttaccgttaacttctcttttacgtgccagcattctttgataatgcttaatacgcttataaagcttttgcaatttaacaggcaaaatattgatttgcccctcggtatagttaaagtggccaacattgacatcaactgctgtcttttgctgggttttagcttttagttcaatttcttcttcataaggaagagccgcataataattatctttttctttgaagacacttactactttgacttcatccatctttagagcttcatagcttcatagctttttaaatcaaaccaaggctcttttgaaatgcttcttgggcgatcaaggcgaagcttaccattaacgatcttagctctatcagttttaaagccttgtctgggagctttcttagatttaaaactaggtattccccaatcaggttgtgacttatcaaagaagttcttccaagcattagctaagtctttaatcgctaattgtaaacatctggcagacaaatcatattgccagtcggctttatttgcgactagttcatcacggactctgcgttcgttaggactgggattatctttttggtttaatgtatgagcttcatacattaattgccaagtttctaagcctttattccagcagtatcgacgatagtcgcatagagcatcaagatgcttttgcatggtcttattaacttttagcttaactacttgtgtcttgatcgtcatttaagtactcgcctctaatctttttcttgtactttcttaagccatatagtctgcatgaaaacacatgaattatacttatcagatcatcaaccagttctttatcaggactagtgtcaatattattcaaaacaattatttcagtcccatgctttttacataggttttcaaaccaatcatagccaaaacggataaatctatctttataagtaatataaattttatctattttgttgttcattacttcgtctagaagattattccatttttgccgtttatagtttaagccgctgccaatatcgcttatttcttcgtctaatacgataccttgtgcgttagcgtattgtcgaatatggcttaattgatcttttaagtcatctttttgaccataagttgatactctggcataagcaacttgttttttatttgagcttagattatttttgctcaaatattgatatatttgatcttctgtatagaatctgcgattagtaggagagcgcttagctttaagaataccctttcgatcccatgtttggagggttctagtggttattcctaaacgatcagcgacatctttaggttttaaaattgtataatattcacttccatgtttaaatttctaatgaatattatggcaaatatttctattatattctataaatttccatattttgttaacagttaatcagctcctttgtaataatcccttaagttgattttagcacttatgagactataaaaataacctcgaaactcaaacgttttcggggttatttgattttattcacttaagtacttaggatcaataaatttattgatcacgttgttaaccttctttgaattatcgtacttgcggataatgttcaagaagtcttgtgcagttgcttgcttcaagtagtaagtttgatagtaatcgtgtaaagcatcgaagaacttggtttcgcccatggcaacctttaaaacagcagggaagtccatcccaagttcgtaagccatgtcttcagtgtcaacgccctttggtggattattaacagggtagttgatgtagttggccttttgattcttattaatgaattggttagcattttcttttaagatcttgttagcacgcttgacgttcttacgagtatagaacttgctgtgcatcagtttagcacagtaggccttattcttagtgtaggtcaaatcgtaaacgccattttcaaggaggttggtaagaccttcgtcaagccaaggttccatgtattcgtcgctgccgacagtgccgtagaaccattggtgaccaacttcgtgagaaacatcttcagttaattcattatatctatcaagtgggtgcttcttttgtaaaaagccgctggcatcgatcatgatcaagccaggatattccatcccacaggtatctttgccaagcaagcctttagtaatatcgatttctttgtaaggatatttgccgatctttttggtaaaaatgtgaaaactgtcttgggcagtcatcaaagcaagcttgttgtattgcttgctgtttttgcttgcaaggtagtagtcgttgattcttacgccgtttgcataagcgtggtcaaccttgaacttgttggaagcagcgattgcgaactcacgcatgttgttggcggtaattgtagttttgccatttttggttgtgctttgaccagaagcggcaactttgtagctctttggtgcgaagaagctaacgtggaaattgcttacagcactgttgcggttttcaccagcatcgtagtatgggtgataattccacttaccgtttcacggtcatgttgtaatttgttgccttgatcgtaagatcagccgcagcttgaacttttgagttgaagttaaataatgccgcaatggttactgcactcgacaataaaagtgttgttcttcttttcataattttccatccaagaaaaatttactctaaattattggaaattatcggcataaagtaaatctattttttgatgataggatataatttatgtataagtgaaaattaatagatataaagaaagaagataaataagaatggttaaaagtattacacctcatttggtttatcacttgaatgggatgcaccatgttgtagcacaagttggtgtagtaaatggtgatcatgtttttgccttgcaacttcttcacagtgcacatgatgtgttggtttatagaaaacatgaaggtttaaccaagaacatcgattatactgatccacacttagtaatgatgggctttggccacacgcaaacctgggtaccagctaatgacaaggatgaatatttcgtaggtgctaaaccaaattcaggcaactggactactcaaattgcacgagtaaagtacccaagacttttaccagaaagatatacttcaaatacacaacttccacgtttgtcacacttgaatcacgtaaccgacgttccttatgatggtcatgatcacttgcacagagtagaagcttcagtttcaccaaatggcaagtattttatgattgcctcaatttgggatgatggttcaggtcactttggtttgtttgacttaaatgaagtaaaccaaaagttgaatgaaaatggcactaagaacacgccaatcactgatttacattgcttgagtgctttccacatcgacaacttcgataatccaagtgttgctccagatgaagaaatgctacaaatgattgattcagttcaaggctatgctattgatgatgacaagaatatctatatttctaaccaattgtcaccaaagattaaccatgaaactggtgaagtaactacttggtcacgtaagattgttaagttcccatggggtgaaacaaacagtgataactggcaagtagctatggttgatggtattgatttaccagatcgttacagtgaaatggaaagtatccatgttaatgccgcaaatgatatttacttaactgtggcttaccaccaaaagtacattaagggtggagaatataagttaagaactttggaaaaccaaattttccatattactgatttgtagaataataaaaatttaaccaagtaaaaaagtgctgatgtgtctttgcttatgaagactatcagcactttttattcatattaatcagtaattctttctttaccaacagcacgttgttcggaaggattataacctaactcttcaatttcttgtcttttttctttgttattgatttgagaaagaatatcccaaaagttagacttatttttcttaatttttgaatttctgttagttttcattgttgtttccttcattttcactttctataaatataagtatactctgaaaaccaaatctatttttagctattaagatcgattaattcaaaatgaaatattttacaaaaatatatgcaatttatatgtaaatgatatacaatagtatcaaattcagaaaggagtaaaaattatggcagaaaaaacaacaggactttatgtcagaatgaatccagaaaagaaggaaaaggcagaagctattctgaaaaagctggggttaaattcagctacggcaattaacatgttctatgatcagattattcttcataatggtattcctttcagagtagagattccgaatgcatgggataatttagatcaaatgaataagtatgaatacgccaaactgcttggcgagcgcctgaacacattgagcggaaggaaagatttgcttggagatgtcgccaagaggcttgatgcggaaaagaatgaaaagaaagacaactaagttttgaggtaaaaattatgatggcaagaattattattggcattattgttgttttagttattgtgtatgtttgttgtggttttagaatcgttccacaaaataatgaaggtttggttgaaaccttgggtaagtattctaagacagtaaaagctggatttatctttgtctggccacttttccaaagaattcgcaaagttccattagcacttcaaccacttgaaatttctaagtactcaatcattaccaaagataacgctgaaatttccactagtttaactttgaactacttggtcactgattcataccgttacttttacaacaacaccgactcagttgaatcaatggtgcaattaatccgtggtcacttgcgtgacattattggtcgtatggatttgaacgcagcccttggctcaactaaggaaattaacgatcaacttttcactgcaactggtgacctgactgatatctacggtatcaaggtcgttcgtgtcaacgttgatgaacttttaccaagtgctgaaattcaacgtgccatggacaaacaacttactgccgaccgtgaaaagactgccgcaattgctaaggccgaaggtgaagctcgtaccattgaaatgaccactaaggctaagaacgatgctttggttgctaccgctaaggccaacgctgaagctgttaagacgcaggctgatgccgatgcttatcgtgtacaaaagatgcaagaagctttgtcaaaggccggcgaaggatacttcagaaaccagagtttagacagcttcaaccaattagctcaaggtcctaacaacttaatcgtggttggcaaggatgaaatgactgacttgggtaaggttcccgctttgaaaaaggtgtgggatgcaagcgacgataagaaagatgaataaaaattagctcaattctcaaatgaggattgagcttttttatacttttaacgtataccagcatcaatattaagtaattttcacactctcttgctcgccttatacttgtagtaacaattgagaacaagaggggaaagaaaattatgtttggtcgtacttattcagatttaggtccagttgttggacaaattaatggtgaagatattcgcgcaaatcaattagaaagacgtggctatgattgggaaaatggttatggcactccatccgatggccaagatactaatcgtgatggtcaaccagttagaaaattaactaaagatgccaaaagcattattatcttttggtcgtgttccggttcaactaagttgctcgcaagtaaagttgcgtgtgaaaccggtgctgatattttagaaattactttaagaaatccttatccagcaaattaccgtaaaacgctcaatcgcgctaactgtgaaagaattcaaaatgattcatcagagcttgagatgcagttacccgatttgagtcaatatgacacaatttacttaggctatcaaacttggacaatgactttgagtcagccaatgaaggcattcctacttgaatatggtggcgaattttctaacaaggagattgcgccattcctttctgaaggtggatatggttcgggtgatagtactgaattgatccgtgagtttattgcacgtgatggtggtaaaaataaaaaggtcgattggacatttgttggtccagaaaatgtcctttgtgctggcattactgataaatttgaaaaggcaggacaaaagattttcggccctaaccaaagaacggcacaattagaaggttcaaaggattatgctctgcgctttatgaacaaatatgatgttccaactgctcgccatgaaactttcaccagcgctgaaacctgtattgccgggttaaaggattttgcatatccggtggcaagggcgtaaccattgctaagaatcaagacgtcgctgaagaaacgatcagagaaatgtttgcaggtggccaaactgctgtcgtgcttgaagaatgcttggttggtccagaatactcaatgtttgtggctgtttctgaagatcaatttaccattttgccaatggcgcaagaccacaagcgagttggcgatggtgataagggtcctaacaccggcggtatgggatcatattctcctttgccacagttgaaaaaagaagatcgtcaaagaatgatcgatgagatcgtgaagccaacgatgaatggcctggttcaaggcgattatcactattgcggtgttttatacatcggcttgatgatgacagaaaatggcccaaaggtcattgaatataatgtccgcttgggcgatcctgaaactcaagttgttttgcctcgaattaaaaatgattttgccatggtgattgacgcagcggtaaatcatgaaaaattgcctgagattgaagaaaatgataattctatcttgggcgtggttgtctgcagtaaaggctatccagcgcacccggcacctaacgtgaagatcggcaagttgccagaaggtaccaatacctatatcgattatgccaatgtgaaaggcgaattggataatctgataggtgatggtggtcgcttgttcatggtgatttcggaagctgacaatttagtccaggcgcaagataatgtgtactcttatttgagtaagcttgatctgccagattgcttttaccgtcatgatattggtaatcgtgctttgagagattagatgtatgaagaaagtcccggttggggcttttttagtttggtttaatacgaacacttggtcgtatttgatgggatcaatgataaaattttctccacataagtggaggttttgaggatcagtcgtctaacgggcaagacaggcttagttaataagcaagatatgggtccaattcccgtcgtccttaatattggaataaagtaaaagctcttagttgtgaaaactaagggctttttcgtttacctaaataatttcctataaaagatctaagtgttcattctgaagatttctaatttgaaactgtcaaatcttttgtgtaaatagatctttctcgtaaattgattttttaattatttatttaatcaaagtaggattctaaggtgtcctgaacctgaccaaagcctttatgaattcgattgaaataacggtcattgtagctcattgcctgaatgccaataaaagcatcaagcgactgttcagttggaaactctgccttaggcttagctttgcgcttgatcacattgttaaatgattcaatcatgttagtcgaataaattgaagctctgatctgcttgggatagttataaaagaccagcagatctggttctatgtctttcaagcttctgataacatggctgtaaaccttgccccatttggtatagaagtcatgcaggacagctgtggcttcttctttgtttgtctgttgatgcacctgtttgaattcgttcatgatcttttcacgatcgtcgacgcgtactttagcgcagatattgcgcatgacatgaaccaaacagcgttgaaaatgagctttaggataagtcctggccaaggctgttttcatgccaacaacaccatcagaaagaaaaagctcaacttgctttaagcctcgggatttcatgttttgaagcatatctgtccagacttcaatgttctcgctaggtgcaatgcagtagtcaatgacctccttgtgcccattaggcttgatgccaatggcaatatagactgcttcacgctcaaatgtttctcggcgcaaaggaaggtatgtcgcatccaaatagacgcagaaaaacttgtcgcttagcttgcgtttgtggtaagcctcaacctttggaatcatctgcttggaaatatttgatacctgagctggactgtaatggctgccatacatcttttcaattagatcggctatttccctggtggtcacgcccttggagtaaagcttgataatcatgctttccaagacatccgagtgctgcttgtagccaggcagcgtgtgctgatgaaattgaccgttgcgatcccgaggcacttgcacttcaattgggccaaattgcgtatcaactttgcggaaataagcaccatttctagagttgccagtattccagccatttctggcatagggatcatagcccagaaaggcggtcaattcagcttctaacaagttattaacagcctgttgtagctctttgcgcaataaatcatttattttgtctggattgaatagagcttgagcaaaatctttggtaaaatcattcatgaaggagttcttctttctgtatgtttttttgttcaaaccaatcatacgagaaaggaactcctttttctaatgtttaaagaaataaatttaaggaatcattcatccttacacaaactattttacagtctcaaagtgtacacccacagcaagcttgattagtaactaaagttttgccaactatgcctaactttccaatagtagcaccatacattgctattaaaatattacctggctgattgactttcacagatgaattagcaactcctgctttcgtgattttttcagaagtatcttgaattacgctatcattcaagtcacctgtttttaaccatagaatatcaccaccataatattctggatgttgacgagaaggagttgcacctgcaccccaatctcctatatttcccaatctagaggaagtatctaataccatagtctattacgcccatccatatacttcttgcgataaaggcactgttgaaagacataatgggcttattcgcagattcattcctaagggtgattacatcaataactattctcttcaggaaatcattgacattgaaacctggtgcaattcgctaccaagaaaaatattggcatatcatacaccagatgaaatctttgaaagagaattggatcatatctatcaagcagcttaagtgttcaatttattattgcaatttacgatcagaattatttcaattcttcacatggattttatcttacattcttaaaccatctggcatcatttcttaaaacggtccaataatgtccaccaatcacaaattgccatagataatgagtacctggacagcgcagtcttaaatatgtccctttcctaataggtgttttatgaataaatttcatttgatacatagcagcacctctaggcacatatggcttatatctataaaccttctcagtagtttttacagtatgccatttttcagaatacttgcttatggcttgaactggttgagcagttgaaacacttacaccagcaaatgttaaacaaatcaatgccagcaacatcgttattttcttcataatattcttttctcctttactcccaatacaagcctattatataagagaaaatttagtatgacctagaatgttattaacttatcaaaaaagcccttaacacaggtaattgatcctatactaagggcttaaatttaatcataatagcatattcaaaaatattgagagagagtagataatattaattctttatatgtgctacctcatattaaactatattcgattgacttaatttctcttgatcttcttgaattaacaaattatataatgcgccatacaagttagcatcatttctaaactttgcactggtaattattggctttttcagcatttgctttatgatgggggtattattcataatttcatcatacgctctgttaattgtcttaattacaattggttgtgcagaaattccaccacctattgcaattttttctaaatcaacaactgtctgcatattaaaaataatagaagcaattccggcacagaatttattgaatatttcactagcctttttctcatgcttattaatctgttcaaaagccttataaccatcttttaagtcgctattgccagctaacgcattaattttagaaatcatttcgaccgccgaaaatgtaaatcccgcgatttcatgtgatttaggatcagcagaaaaacgcataaaacttaattcaccagcttgagcattaactcctaatacaagttgattatttacaacgactccgccacctattcctgttcccaaagtaatagaagcacaattgcttgtatcctttaaattacctagccaactttcagctagtacacttgcttttccatcattaataacagctattggaatacctaatttttcatatctgcgttgaaaattcataccatccaaaaaggttaaggcaccaccaaaatgaatagtattatttattatctgtcctggtgcacagaatgcaattcctttaaggttgttaaatttataaacaatatgatcaatgttttcaagaaactcttttttctttggaattgtgagagactgtaaaatagtttgtgtaaggatgaatgattccttaaatttatttctttaaacattagaaaaaggagttcctttctcgtatgattggtttgaacaaaaaaacacatacagaaagaagaactccttcatgaatgattttaccaaagattttgctcaagctctattcaatccagacaaaataaatgatttattgcgcaaagagctacaacaggctgttaataacttgttagaagctgaattgaccgcctttctgggctatgatccctatgccagaaatggctggaatactggcaactctagaaatggtgcttatttccgcaaagttgatacgcaatttggcccaattgaagtgcaagtgcctcgggatcgcaacggtcaatttcatcagcacacgctgcctggctacaagcagcactcggatgtcttggaaagcatgattatcaagctttactccaagggcgtgaccaccagggaaatagccgatctaattgaaaagatgtatggcagccattacagtccagctcaggtatcaaatatttccaagcagatgattccaaaggttgaggcttaccacaaacgcaagctaagcgacaagtttttctgcgtctatttggatgcgacataccttcctttgcgccgagaaacatttgagcgtgaagcagtctatattgccattggcatcaagcctaatgggcacaaggaggtcattgactactgcattgcacctagcgagaacattgaagtctggacagatatgcttcaaaacatgaaatcccgaggcttaaagcaagttgagctttttctttctgatggtgttgttggcatgaaaacagccttggccaggacttatcctaaagctcattttcaacgctgtttggttcatgtcatgcgcaatatctgcgctaaagtacgcgtcgacgatcgtgaaaagatcatgaacgaattcaaacaggtgcatcaacagacaaacaaagaagaagccacagctgtcctgcatgacttctataccaaatggggcaaggtttacagccatgttatcagaagcttgaaagacatagaaccagatctgctggtcttttataactatcccaagcagatcagagcttcaatttattcgactaacatgattgaatcatttaacaatgtgatcaagcgcaaagctaagcctaaggcagagtttccaactgaacagtcgcttgatgcttttattggcattcaggcaatgagctacaatgaccgttatttcaatcgaattcataaaggctttggtcaggttcaggacaccttagaatcctactttgattaaataaataattaaaaaatcaatttacgagaaagatctatttacacaaaagatttgacagtttcaatattttggattaatctgtattttgcttataataaaagcaatggtaaatatttatttttagttaatgaaaggccccaaaaatatgttatctaaaagaaattatcaagaacgtcttcggaagatggcccccaaaaaagagcgcttttctattagaaacttaaacttcccacacgcagaatcgctccttttattgtgattctgcgttttttaacaaatataaaaggcacatgaccttttcattgctataattaaagtgaccaaacgataattctatgcatgaaaggcttgtgccaatgtctattttaccatctcctgaccaaaaaaatgaacaactattttcaaactcaatcatcagcttcatcaagaagtttcaggtgatcaagctgttgagaaaatgtggcttccgcaaggaaaaaggcattagcctgttcagcttgtttctttacgttttaagcaatgtctttcgtgaccgcagcttatatatgcagctgaaaacggatcattttaaagaaagcttttctaaaaattcttattaccgatttatgcgcaacgtccacgtcaattggctccacttcaccacactgctttctgcgcaaatcattaataatcacttgcgatctttgacttcagaaaaacgggctgattgctttgttgtcgatgattcctacttctctaggaccggcttcaagaaaacagaattagtcgccaaagtttttgaccatgtatcaatgacttacaagaaaggttttcgcatgatgaccctgggctggactgatggagcttctttcatgccaatcaattcggtgttgctgtcctctcacaagctacagaatatgattggcgaaaacaaagtctgtgatcagcgcaccattgctggcaaaagacgcatgcttgcccggactaaaggcacagacgtgatggttaatttaatcgaccaagctatgaaagcaggtcatcaagccaagtacgtgctgtttgacagctggttctcaaatccacatcaaatcgtccagctcaagcaaaggaagctggatgtaattgccatggttaaagttagctccaaaatcaaatatgaatttgaaggagaacgcaaaaacatcaaacagatttatcgtagctgtaaaaagcgacgcgggcgttcgcgctatctgttgtcaattccagtcaaggttggccgccaagacaaagacggtgctaaaattgacgctcggataatttgcgttagaaaccgtgccaatcgtaaagagtggctggctattatttgtaccgacatgtcgcttagcgaagatgaagtcattcgcaattatggcaaacgctgggatattgaagtttttttcaaaacctgcaaaagctacctaaaactaagcacggaatatcatggtctgtcctacgatgccttgactgctcatgtggctatagtctttacccgctatatgctcatgtcagtagccaagcgggacgacgaagatgagcgaaccttaggtgagcttttctattgcatgattgatgagctggcggatattacattcagtcattcacttcagctaatcacaaaagcaatggtggctagcgttgaaaaagtctttcatgccagtgaagcacaaatagcagaattcacggctgactttatcaatcgtttacccaaatacatgcaaaaattgttaaagaaaactagcaaaaatagtatagaagcccaaagctaagcaatatcaaagaattgccagcttatttgatgtgggaagtttaagttagaaagttttctgttggagcagcgtctgttttaattggatttactttcgtgagtatggctggaagtcacaaagttcaagctgcagatgtagctgataaatctgtagtagttgacactttcaataaagataagagtcaagagctaacagaaaataagactattgcaatgccaaaagcagaaaaaacggctgttagttctgtagtacaaaaaggtgcctctgcaaataaaattgaagcagaaaatactacacaagttgataaaaatacagaaggttctgtaaaggtacaagaaaataaagacgcagtacaacctaagactgttaataatgaaaatgtattaaatgtatcaaaagcacagtctcaatctaatgaagctgtaactaagaatgcagcagaatcaaaagtagcagcactacgtgcttttagagcagcacctcaagctactcaatcacaagatgccaatgatttccaaagcttagttaatgccatgaatgatagtagcattggaactattaatattaccaatgatattactattaccggtaaagttaacggccttactacttctggtatagatgatataaacaagcactacctttatctgcagtctaaaggttcagctcgtgacttaacaattaatggtaatggtcacactatcaactttgccggttacagtattgctttacaaaacgagaactaccacaatgctgctggcccttggaacattactttaaaggatatgacgattgagggtagtaagtatggctattcaccaatttcattctatagcagcaagactaatactgaaaatagtaaattaatttttgatggtgtcactgctaacttgaatgatcgtccattagttgacaagtatggtgaaaacttaccagttcactttgccggtgataacaacattatgcttaataatatgtcaattggttacaatctagtaactggtaagactgtaaaatttgactctggtaatactacttttaatgttggtggtaaagtaactggaaatgctattaatcctgacaactgggtaattcgttcaactgaaaatgctagtaatagtgaaaatccttcaactttaattaatgaaggtgcaactgttactattaatgctaaatcagacgacttacgtggtatttatgctgggcgtcaactaacagctggtcagccaatctatggcgttactgttattaatggtactttgaatgccaacatggcagctggtcactcaactgcaatttggtcacatgatcttgaaattggtaaaaagggtaatgtaactatccataccaagcaaacaaatcaggctgatggtgttgaaaatggtacttctaattcagtaactaattataatggtacccactatgctccaatttcattaggtgttggtccaataagtagtgttgccagtccattatctaagcaaactgccagcttaattaacaatggtagtttgactattatacgtgatactactgaaaagacattggtaccattaatttcaatgggtgacggtggtttaagtactaataccacgttgaaatttttggttggtgccggtgctactctcgatttacaagacaatgcaggtacatttcaatatggtactgaacctagcacaccattgaatggtttgattactctgtggggtacgagtggtacagatttattggaatttcttaccccagcatatgtcaacttacaacgtactggtgatattcgtggtacattgattagaatggaaggtgtctacaacagtactactgttaatggaccaacaccagttgctcaatgggatcaaggtaataagactactattcctaatgatgtttggtatgtaagatacctgatatctgcgaaccaatggggtaataactctggtcaatttatgagtaaaggtcaacatcctaatactgtcgttgcgcagaaaggtgttgatacactttataactctaatgctactgtcttaatgtctaagaaccaaggcgctgataaatacgaaaacggtacaatgccaactgaagtacaacaggcactgcacttgaacagcttcttaaacaactttaacttgtggcgtccacaaagaatggctatgggtagcaagttgaatgatagtcctgacgttaagattgatgattttgataagtatcacccagaagtgcaaacgattgatggaactactcgtcaaacattaagtgatcttgatgctaataagggacttaaagatttaattggtcctgatgaacaaccaatcactgacttcaaggatattgttaagcatgttacttggtacaattctgcaactgataaggatgaatggaacaagatcatgatccagccgactgacagcaaggatccaagtgcccgagttccttatccaaaaccacaaaacccaacaggtaatttaaagactactgatggttttgcttgggctaaggtaacttatgctgatggttcagttgactttgttaagattccacttaaggttactgaaaagaagtatagtgaagaattaactccatcttatcctggtgtttccgttgagcaaggtaagtctgatagcgtagatccaagctttaaggatgaaaacgataaggctgctgatgctccagcgggtactaagtacactgcaggtgaaaatactccagattggattaaagtagatcctgatactggtaaagtaactgtttcaccaactgatgatactagtgtaggttcacatgatatttctgtaacagtaacatacccagatagcagcactgaccaattaactgtaccagtaactgttaccgaaaagagtaacttagctgagaagtatccagttagctacgacaagttaaatgttgaaaaacctagcggcgacacaccagcaactggtgcagtagatccaaaggctgctgcagatatgccagaaggtgcaatcactggttacgaaaaaggtgactttgatgctccagcgggcgtaactatcgatgtaaatcatgatactggtaaggtaactgctagtgtaggtaaaaacgcaacattaggttcatttgaagttccagttaaagtaacttatagtgacggtacttatgctgaagtaaaagttcctgtaagtatcactggtaacaaggttgatccaggtagtggtgacgttgtttactacggtgatcaaagtatggtggtcttcaatggcaaccttactactgttcacaagactactgatagccatgaattaagtgctaaagacagtgccttccaaacaatcacatattactctgattggaacaagaaaggtaacatcgttagcgactataacaagcatgtgatttacaagctaagtgctgatggtactaagtatgtaaacgaagctgatgctacggacagctttgatgctagtgcaattagctttaactggcagaagggttatgaagttaacactggtgttgataactttagcaatggttctgcagacacactttaccaacttgaaaatggtgctgttaactctgaagagcaaactgatgccaatgatccatcaggtttagcaggtaactctaagtatcgttacgactttagtattagtgatactaatgtattgcaaaaactaggtttatcacctgctggttacaatgcttgggctaatgtttactacaacttccttggtgcaactggtaaaattaatattccagtaaactatggcagtgaagtatcaactgatgaagctggtattaagaattacttagcaactaacagtatctcaggtaagacatttgtcaatggtaacccatctggtattaagtgggctgaaaatggtatgccaggtaaagatggcaaatttgctgcttctaacatgactgggattgttgaatttacttttgataacggtactaagttaaatgttcaagtaacatttaagactggatcacatgttcaaacttcaggtagtaaagttaatgacgatactaacctttatgtagaacgtacaattgaatatgatgtaactggaactggtcattcaccaattaactcagtaacacaaaaggttcactatgtacgtgatggataccacaagattaatgctgatggtacagatgctggggaaattatctggaatgaatggaaactggctgatggtcaaactgctgaattcccagaatacagtgttgaccaaatcacaggctatgatgcatatatcaatggtgcaaaggctactcaagttgatgctgccaaagttgctgaaacaaatggcacaccacaaaatggtcaaaacatcacagtaacttacaaaaagcaaaatagtactccagtaccatacaaaccaggtaaagatggcgtaaacgatgccattaacagatatgtaactcgtacaatcatcgttaaggaaccaggtaaagaaccacaaactattactcaaactgttcacttcactaatgaagataaagatggtaatagtggctacaaggatccagtaacaggcgagattaaatacaatactgactggcatgtagcaagtgatttgaaagctaagactggtagctgggaagaatatacagcaccatcagtaacaggttacactccatcacaagctaaggtagaagcaaaaacagtaactgcagaaactgaagctgctagcgtaacaattagctacactaagaatgcagatattccggtaccatacaaaccaggtaaagatggcgtaaacgatgccattaacagatatgtaactcgtactatcaatgtagttgatccagtaactggtaaaattagtacaagtgtacaaactgctaagtttactcgtgaagataaaaatggtaatagtggctacaaggatccagtaacaggaaagacaactataaatccatggactccggctaaacagggactacgtgctgttaatgttgagcaaatcaatggttatgtagctaaagttgatggtaatgtggacgcagtagttgtaactcctgattcagctaatatggtagtaactattacttaccaagctaataaaccagaaggtcaaaacattgctgttaagaaagatacagtaccagatccagcagatggtattaagaataaggatgacttaccagatggtactaagtacacatgggagaagactccagatgtaagtaagccaggtgatgtaccagcaatagtagtagtaacttatccagacggttcaaaggacaaggtagatgttcatattgttgtggataacccaaccccagagccacaagatgttcacactactccaggtgtagtaccagacccatcaacagccatcaagaataaagatgagatgccagatggcactaagtacacatggaaagaagttccagatgttaactctgtaggtgagaagactggtatagtaactgtaaccttcccagatggcacatcagtagatgttaaggttaatgtatttgttgatcctgttaaggaaaataacaatacaattgcagattcaaacaatactaattcttctgataagaatactgcaaatgctgcaacagttaatggtaagtcagaaaacaagaagactttgccacagactggttctaagtcagatgccgctgcaattgccggtttagcagttgccatcgcaggtagcttattaggcttaggtgttaacagaaagaaacgtcaaaagtagaagaactatttataattgatccaaagaaagattaggtgataaacctaatctttttttgtgccttaatttgttatttgatcatgtttaataatttttccgtaagcgtcgtaagcgtcatataaccgagtatcttttttagtccgtatttttcaggtattctaatctcatcaatttaatggaggttaagaatatgatcgaaaaacaacaacccattgtggcacttggccgttcttctaaacctaagaaggctcgtccaccacgcaataatctgttgcttagtttaaagaagaatgacttagagctgaatttttacagcagcttagaccctgaaattatgaataagctgcttgagaaagtcttgccatgattaagctcagtgacttagggcaagtctatatcgtttgcggcaagacggatctgcgtaaaggcattgatggactagcaactttagtcaaagaacagtttgaacttgatccttttagcggcaaagtcttcctcttttgcggcggaagcaaggaccgcttcaaagccctttattgggacggacaaggtttttggctgctctacaaaagatttgaaaatggaaaattgaactggcccaggaatcaaaatgaagttcaagctttatcttctgagcaggtcgactggctaatgaagggcttcgcaatcaatccaaaaataaagaacacgaaagcgtgcgaattctactaacacttgacatcgcacgcttttttgatattcttttaactaataaatttaggaggaagtttaactcatgtcacaagaaaatttggaaaagattattgcacaacaagcaactactattcaaaacttaactgatgaaattaagctcctccgtgaacaagtagcttacttaacgcaaaaacgttatggcaaatcttcagaacaaatgcctttaaatggacaaacaagtctctttgatgaacctgatgctcaagatgacggagaacgtccccgacgccgccgttcagactattacttataaaagacaagctcacaaacgaaagcgtgctgacttactagctgcccttccagctgaagaggttcaccatgaattaggcgacaagcattgtcctgattgtcatcatgaactgattgagataggcaagcagtcagttcgccaagaattattgtttatcccagctcaacttaaaaggttagaccatatccaacatgcttacaaatgtaaatattgcagtcaaagaaatcttagcgacaagatcattaaagctgcagtacctaaagctcccctaaaccatggtctaggttcagcttcactcatcgctcattcactttatcaaaaatatgaaatgaaggtgccggactatcgtcaagaaagcgactggaagaagatgggactagaagtttcaagacagatgttaaattattgggatttgaaaagcagtcaatactactttaaaccagtgtatgatctgcttaagcaaaagctgttaatgcggccaattttacatgccgatgaaacttattatacagtcttagaaagtaaaacaatcaagacttactattgggtcttcctttcaggcaaacatgatcaatacgggattacactctatcatcatgatccttcccggagttgcaaggttgccttaaactttttaggaaactatcccggttatttgcactgtgatatgtggcaggcttatgagcaattgccgaaagcaactttagttggctgctgggctcatgttagaagaaagtttcacgaagccgtaccacaacaggcttctgaaaagtcccttgcccaaaaaggactcaactactgcaatcgcatgttttacttagaacaaacctgggagaatttgagcaaacaagaacgttaccagctaagacaagcaaagctcaagcctctgatgcaagagttcttcaactggtgtgagaaaaataaaatcaccgttttgccaggctctaaattgggaagagccattaattataccctcaagcatcaagctacttttgagcatgtcttgcttgatggcaatttagaattatctaacaataaggctgaacgcgctgtaaaatcactcgtcatgggccgaaagaattggttattttctcaaagttttgagggtgctactgcaagtggctttattctaagcttaattgaaactgccaagagaaatggccttgatcctgaaaagtacttgaattatttgcttcagaaattaccgaatgaagagattctggattcggaaacccttgaagcttatttaccgtggcaagagaagatccagataaattgtaaataaaagaacttaaataaccgtctcagtataacagtaactgggacggtttttaagtacactattttatttgacgcttacaaaatatatagaagaagtagataaacaaatggaggcattaggtgagtttttctttataacaaattattcaggaattaaggttaagtgagtatggaagaagtatttaatgatggtatttacgaatgcatagtagtagcaaccacggtagaaaaatataaggtaacttccaaagttacaattattctacaaattagagatgatattgatgccgttgaattaaaaaaactaatagaatttatgctggatataggttaaaactagaatattggcaaaaaaagatttcgcatactttcaatattaataattttcaatatttgtgttatgcgtgtggccttccgagaccgtaaaatagtttgtgtaaggatgaattattccttaatttaatttcctaaaacattagaaaaaggagttcctttctcgtatgattggtttgaacaaaaaaaaacatacagaaagaagaactccttcatgaatgattttaccaaaaatataactcaagctctattcaatcaagataaaattaatgatttgcttcgtcatgaaatccaacaagctgttaatgacatgttagaatctgaactgactgcctttttaggatatgatccctatgctagaaatggctggaatactggtaattctagaaatggtgcgtatttccgtaaaattgatacccagttgggatcaattgaggtacaagtgccacgagatcgcaatggtatgtttcatcaacacactctgccagactataaacaacatactgatctcttagaagatatggttataaagctttattctaaaggtgtaaccactagagaaatagctaatttgatcgaaaaaatgtatggcagtcattatagtccagctcaagtgtctaatatctctaagcaaatgattcctaaagttgaggcttatcaccagcgtaagctgagcgataagttcttttgtgtttatcttgatgcaacgtatataccgttgcgtcgagaaacttttgaacgagaagcagtatatattgccattggcatcaagcctaatggtcacaaggaagttatcgactactgcattgcgcctagtgagaatattgaagtctggacggagttgctccagaacatgaaatctcgtggtttaaagcaagtagagctttccctttcagatggcgttgtcggcatgaaagcagcactggcaaagacctatcctcaagctcatttccaacgctgcttggtccatgttatgcgcaacatctgcgctaaagtacgcgtggacgatcgcgaggcaatcatgaacgaattcaagcagattcaccagcaagccaataaagcggctgctgttgatgtattgcatgctttttatgccaaatggaacaagagctacaatcgtgtcattagaaacctgaaagacatcgagccagacctgcttgttttttataattatcctaagcagatcagggcttcaatttactctaccaacatgatcgaatcctttaataacgtcattaagcgcaaggctaagcctaaagcggagttcccgactgaacagtcgcttgatacttttattggcatccaagcaatgagctacaatgaccgctacttcaaccgaattcacaaaggctttggtcaagtccaggataccttagaatcctattttgaataaataaaacattaaaaaaacaatttacgagaaagatctatttacacaaaagatttgacagtttcggaaaatcaactactttaagaatgatcgcgggtttggaaaatattagtaaagggactttggaaattgaccatcaagttatgaatgacgtcgcacctaaagatagaaacattgctatggtttttcagaattatgctttgtatccacacatgaccatttatgacaacatggcatttagtttaaaacttcgtcattataaaaaagatgaaattgataaaagagttaaaagagctgcaaatattttgggattacaaggctatttaaagaaaaagcctagtgcactttctggtggtcaacgtcaacgtgtggctttaggtcgtgcaattgtacgtgatgcacctattttcttaatggatgaacctttatctaatcttgatgccaaacttcgtgtagttatgcgagctgagattgctaaattacatcaaaaattaggcacaacaaccatttatgtaactcacgatcaaactgaagctatgaccttagctgatagagtcgttgtaatgtcagttggcaaggtagagcagattggtacaccacttgaagtttataatcatccctcaaatcaatttgttgcaggttttattggttcgcctcagatgaatttctttaatgttcattataagaatggaagtattacagatggtaagggcttgaatattggaattccggaaggtaaagccaagatgcttgaagaaaagggctatgcagataaagacgtaatatttggaatccgtccagaagatattcattctgaacaagcctttctggaaacatggccaaatgcagttgtagaatcgcaagttgtcgtttctgagcttttgggttcaacgattcaactgtatcaaaaagttgatggtactgagtttgtagctattgtaaattcccgcgattatcacaaaccaggcgacaaggttaaaatggggtttgatgttaataaggcccacttttttgataaagacactacccaagccatcgttaattaaatattatttttctctccccctagataaataaaacaatgctttaagatagttcactattggaaattgacaataatgaactattttttgtactaaccatctatggaaaaatgacaaagtaaatttgcaagaatagagttttattttaatattaatatttactagatatagattaagcaatgaaatgatgattttaaagtggtatgacacagattataaaacaggacatctgagaagcggtaatatggttaccatatttatgctgatagccactgttgccaagattgaagtaatcttaaatagtaatccacattggtgccttccaccatttaatgaatttttgtttagtagtgagataaagcgtagtgtgtttaagcctgatgatgagttgaaacaatttattagagattttaataagaaacaccaaaaacaaaattgataaatttccacttgtaactactattcttgtttaatatcttttgatatagttttaaacaagaggaaaaacaaatgttttgtcttaaatcattatttaactcatgagaatgtaaatacgataatcaatggtttaaaatcttcacgacgtccattttttatttaacttaagagaattacaattaaagctccaatcggggcttttttctttttcattaaacttcctattaaaagattacccttgaaactggtaaaatagataagtaagtatagagaacaatttttataaaaggggaataaaatggcagataaaaaattacttctaatcgatggtaactctgtagctttcagagccttttacgctctttatcgtcaactagaatctttcaaaagtccggacggcctgcacactaatgccatttatgcttttaaaaatatgcttgatgtccttttgaaggacgttgatccaactcacattttggtagcttttgatgcaggaaaagtaacttttagaacaaagatgtatggagaatataaaggtggacgtgccaaaactccagaagagcttctcgagcaaatgccttatattcaagaaatgcttcatgacttgggtattaaaacttatgaattgaagaattacgaagcagatgacattattggtacttttgtcgataagggtgagaagaacggctttactactactgttgtgactggtgaccgcgacttgactcaactcgcttctccaagcactactgttgaagtaaccaaatcaggggtttctcaacttgaagcctacacgcctgaacatatgaaggaagttaacggcgtcactccaactgaattcattgatatgaaggctttgatgggggataattccgataactatcctggtgttgaaggtatcggtcctaagacagcctctaatttgattcaagaatatggttcagtagaaaacttatacgatcatattgatgaaatgaagaaatctaagcgtaaagagcgtttaatccgtgacaaggacaaagcatttttagctaaaaaacttgccacaattgaccgtgattcaccggtaactctagatatcgatgatataaaacgtcagccagttgattatgaaaagctgcgtcaattctatgaaaagatgaacttccgtaagttcttagctgatttaaatgcttcaggtgccggtcaagatagtactgaagttgaaaaagtggaatacatcgttttaaacgacgacaacgttaaggatgttaaggctactgaagatgacaccattgagttttatctagaaatgctcggtgctaactatcacttagctccttttgttggcttcagcttgaagatcactgacaagatctacgtttcaagagacgtggaattgcttgaagaagataatatcaagcacatcttagaagacgaaaagattaagaagaatgtctttgacctgaagagaacaatggttgctgcacatcgtttggacattcacactcacggccttgattacgacatgcttttggcatcctacttgatcaataatgaaaataactctaacgaccttggtgaaattgcccacctttatggtgattactccgttaagactgacctcgaagtttacggaaaaggtaagagcgagcacatccctgatgacgatgatgaattattcaaccacttagcttctaagatcaatgctatcgaatcacttaagaagccactgcttgaaaaactcaaggatcatgaacaagacgacctatttgaaacaatcgaaattccaaccgcgcgcgttttagccagaatggaaatgaacgggatgaaggttgaagcaagtactttaattcaactgcaaaatgaatttgccgttaaattgaaggaactcgaagacaagatttacagtcaagctggtgaaaagttcaatttgaattcacctaagcaattaggtcacattttgtttgaaaagcttggtttaccaccaatcaagaagaccaagactggttactcaacttcagttgaagtcttggatcaattaaagacgcaaagtccaatcgttagtgaaatttgggattaccgtcaaattgccaagattcaatctacctatgtaaagggtctgcttgacgttatccaatcagatggccgtgttcacacgcgttacttgcaaaccttgactgcgactggtcgactttctagtgtggatcctaacttgcagaacatccctacccgcaccgaagaaggaaagcaaatcagaaaggccttcgtgccaagcgaaccagacggctacatcttctcttgcgactactcacaagttgaactccgtgttttagctcacgtttcgggcgatcaaaacatgcaagaagccttcaagaccggatacgatattcactcacacaccgcgatgaagattttccacttggattcaccagatgaagtaacgccattgatgaggcgtcatgctaaagccgttaactttggtattgtttatggtatttctgattatggtttatcaaagaatttaggtatttctagaaaacgtgctcaagagtttattgacaattactttgaacaatatccacaaattcgtgaatatatggataaggctgtgcaaacggctcgtgaaaagggctatgcagaaacaattatgcacagaagacgctacttgcctgatattcatgctaagaaatttacagttcgttcttttgctgaaagaactgcgattaactcgcctattcaaggatcagcggccgatattatcaagattgctatgatcaatatgcaaaagaagctagatgaactacatttgaagaccaagatagtcgttcaagtacatgacgaattgatttttgatgtgccaaaagatgaattagaaacgattaagaagatagttccagaagttatgcaatcggcagtgaagcttgatgtgccattgattgcagattctggttggggtcataattggtatgatgcaaagtaggtgatttaatgccagaaatgcctgaagtcgagacggtgcgacggactttaactccgctaatcgttggaaaaacgattaaaaaagtagtactttggtatcccaaaattgtggcaacagaccataagaaatttatcaaagaactaccaggtaaaagggtcttaaagattgatcgctatgctaaatatttactgatacgcctaagtgataatttaactattgtgtcacatttacgcatggagggaaaatatcatttaaccactcccgatgcgcctaaggataagcatgaccacgtagagtttatttttactgatcaaactgccttgcgttataatgacgtgcgtaagtttggccgcatgcagctgattttaacaggtactgagcgccaagtgacggggattggcaaactgggccctgagcctaatagcatagaattttcgtcagattattttatcaaggccttgagccgtaagaagaaaaatattaaaaatgtcttgcttgatcaaacaaccgttgcaggtttaggtaatatctatgttgatgagacactgtggcagagtggaattcatcctttgagtgccgcaaataaaattccgtcagaaaaagcaaaagagctgtggcagaatattaaccaaactattaaaattgcaacaaaaaagcgtgggacgactgttcatacttatttagatgccaacggaaatgttggtggctatcaagaaatgctcaaggtttatggtcatgcaggtgaaccttgtgcaaagtgtggcacggaactagaaaagattaaagtatcaggcagagggacaaccttctgtccacattgtcaggtggtttattaatgagctatgttttagccttaactggtggtattgcaactgggaaaagtacagcggaccagttttttaaagcaaataaaattcctgtgatcgatgatgatcagattgctcatgatttgatggagcctgggcaagcttcttggcaggcgattaaagattattttggctcagagtatttaaatgatgaccaaacgattaatcgaaagaaattagggcaattggtatttaaggattcgcgggctttaactaaattaaatgagttaacgcatccgttgatttttttgcaaacaaagaaattgctaaatcaatatcaagctcaaccaatagttattcttgatgtcccactttattttgagtcagggatggataagaaagatatagctgacggtgttttagtgattactttgcctgagaaaatgcaattacagcgtttgaaggagcggaatcatttaaccgatgaagaagcaagaattcggatgcaaagtcagttgcctatggtcaaaaaagagcaattggctgattttgtgattgaaaatactggtacaataaaagaactagagaataaactagcacaattattggtaaagattagagaagagggatagctatggaatgtccaaattgtcatcaaaatgcttctcgcgttattgattcgcggcctagtgatgaaaaccgggctattagacggcgcagagaatgtgaaaattgttgttttcgctttactacttttgaacgagtggaaactgctcctttgttggtagtaaaaaatgatggtactcgtgaaccattcagtcgaaagaaaattttgcacggagtaatggcagccggacaaaaacggccaatcagtagtgaacaatttgagcaattggttgatcgtgtcgaaaataagataagaaaacaaggcgttagtgaaatttcatctaagaagattggtcagtatgtcatggatgatttggctaatttggatgacgtagcttatattcgctttgcttcaatttaccgtgagttcaaggatatgtctagctttatgaagacaatggaagatatgatggccaaaaaaggaaagggtaattagtcatgtttgcaacgtctgatcctaagcatctttattatgtagccaacaagattaccctttttccagagaatgagaaaatcttgattaaactgtatcagcctttggttggcgcggtggcaattgccttgtatcagactttaatcaatgactatgatccatatggtattgtttctgatgcaaagggaatttattcactacaggagcaacttgattgtagtttaaaagatatgtttcattctttgcataaactggaagccgtaggtttagtgcaaacttttttagcggataatgtcttcaataatatcattgtttttaagttattacaggttcctagtgcagacaaattttttgcaacacgactgctagcaagtttgttgaaagaaaaagttggcagcccaacctttcatgacttgagtcatgcttttgctaaggaagcaaaactgcgtgaaaagccaatcaagaatgcgcgcgatgtctcagccaacttttttgatgtttttcgcttgccaggggatgaagcaattaatccatctaatgaggtagtagaagctgcgcaggaaaataaagcgcctgaggtagaaactgctgaaattaatgcccaggatccaattgattgggatctgattaaagatcaatataatgtctatcaaattccagctcaagaagtagaaattaaaaagaaccaaattcggggcttaatacagacatataatttatcggaacaggaatttgtggatgagactgttccctgtttgcatggtacacataaattaaacatgcatgaaattagtaataccatagcagaaaattataaacgattgcatactagggaaaacattcaaaaacaaattgaagaaggcaaaaagcgcgctattgcgactatcaaaggtttggacgctaatgatagaaaactgttactcgaagctaatgaaaattccccatctgaatttttatacaaattaaaaactgaaaagggtggaattgtagctccaggcgaaaactatattattaatcagctgcacacgcagtatggcttgccggaagatttgattaatattttgattcatacctgtttgacctacgatactgttgtaacttctaatcgtgcttatcgaatagctaatgattggctgcaaggtggtattagtactggggtacaagctcttgaatatgtgaagaagcgtaaagccgatattcttaaaaagaaaaatcgacagtcatatcgacaaaataagcgagtcgaaaaaggtaccgattggagcaagaaaaaggctaaaaatgaaggtatgtcaatagaacagctgaaggatatctttaaggatctgaaaaataagtaaatagagggtaggtgaaataatggaagcaattggtgatttgcttaaaaaaatagttaaagagcgtaatttaggtaatgagaaagaactgttgaaaactgctttacacgattcagatgtgcaagcgtttttgcaggcaaatagggaaaaaatagataaggcgatgattcgaaatagtatggccaatatctatgaatattatgcgcaaaaacatagtcagaatcaggtgctggccggttatgctccgcaattatttttgaacggcaaagtaattgatgtacgttacaaacctaccgaggctaagattgtagcagatcagcaacgagcagccaagcggcgtcttcatttaattgatctgcctgctaaattgcatgatgttaatttaagtgatattgaggttacaaatgatcgccagcaagctttaaccctgatttatgattttttgaaaaagtacaaagctgatcctcaccaacaaggcctttatttgtcgggcgactttgggatcgggaagacctatatgctagcgggacttgcaaactatgtagcaactaattttgatcggaatgttgtatttttacatgttccaacttttattgcaggtttatcaagtcattttggtgataacagcttgcaagatgagatcaggaatttagctgaatgcgatgtcttaattttggatgacattggggcagaaaccttaagtcagtggtcacgtgatgacgttttaggagtaattttacaggcaagaatggataatgttttgccaacctttttctcttctaatttagatatggaagcattagagtcacactttgaggaaacccgtaatgcaactgatccagttaaagctaaaagattaatgcaacgagtacgttttttagctaaagaagtagtagtttccggtcctgatcgacgaaatttttcgcattaatttcaaaaagttcttgcatcgttcactttgatgcgtataattgaagttaattaaacgagacatgatgatgttcggctcagagagaaggacctagttctggaagttcttcattagaaaatcaccccaatcgtttattcccaaaattgaattttaagaggctggatacctttatcaatctatacgagaggttagacgtacgctaacctgaattttgggtggaaccacgcaattaacacgtcccagtgcttttattagcactgggatttttttattggaggtaaaaatatgagtttttcaattactttgccagacggttcaaagaaagattttgataaggctgtttcagttaaggaagtagcttcatcaatcgctacatctcttggaaaagctgccgttggtgctaaagtaaatggcgttgttaagccacttgattatgaaattgacaatgatgttgaagttgctattcttactgacaaggatgaagaaggcttagacattttaagagctactgctgcttttgcacttgaagcagttgctaagaacaagtacccagaacttcgtttgggtcaacatgttgctgatgaaggcggcttttacgtagatactgacaaagatgaccaaattaaggttactgaattgccagaacttgaaaaggctatggaaaaattagttaagagtggtcaagcaattgaacatgttgtaatggacaagtcagaacttgaagatattttcaaggatgacccttacaagactgatcttttgaagaaaattgatgctgacaaggttgatgcttacaagttaggtgatttcgttgactttggctttgatgctttattgccaaacactggtaagattaagcacttcaagcttttgtcagttgctggtgcttactggcttggtaaatcatccaacccaatgcttcaaagaatcttcggtactgctttcttcaaggaagctgctttaaaggaagatttgaagcgtcgtgcagaaattaaggaacgcgaccacagaactatcggtcgtgaccttgacctcttcttcgttgatcctaaggttggtgctggtcttccttactggatgccaaagggtgctactattcgtcgtgttgttgaacgttacattatcgaccgtgaagttgctgacggttatcaacatgtttatactccagtattaatgaaccttgatgcttacaagacttcaggtcattgggcacactaccgtgatgacatgttcccaccaatggacatgggtgatggcgaaatgcttgaacttcgtccaatgaactgtccttcacatattcaaatttataagcaccacattcgttcataccgtgacttgccacttcgtgttgctgaacttggtatgatgcacagatatgaaaagtcaggcgctttgtcaggccttcaacgtgtacgtgaaatgactttgaatgatggccacacttttgttgccttggatcaagttcaaactgaattcgctaagattttgaagttaatcatggacgtatacaaggacttcgatattactgattactacttcagactttcataccgtgatccaaagaatactgacaagtactttgcaaatgacgaaatgtgggaaagaagtcaaaagatgcttaagggtgctatggatgaccttggccttgactatgttgaagctgaaggtgaagcagcattctacggtcctaagcttgatattcaaactaagactgctttgggtaatgacgaaactatgtcaactatccaacttgacttcatgcttccagaaagatttggcttaacttacgttggtcaagatggtgaagaacaccgtccagttatgattcaccgtggtattgttggtactatggaaagattcattgcttaccttactgaaatttacaagggtgcattcccaacttggcttgctccagttcaagttgaaattatcccagttaaccttgatgctcatggtgaatatgcagaaaaggttcgtcaagaacttgctaagcgtggcttcagagcagaagttgatactcgtaacgaaaagatgggttacaagattcgtgaatcacaaacccaaaaggtaccttacactttggtgttaggtgacgaagaaatgaagaacgatagcgtaaacgtacgtcgttacggtactgacgaaaaaatttctaagagccttactgattttattaatgaaattgatgcagatgttaagtcatactcaagagaaaattaattaatataattaaaaaataaaataaaaaaacgtatgctatgatccgtaccgtgtcaagtagacagcttaaatatataaattaatttgattaatcagttcgctattgtgcgagctgatttttcttttcatcaatctttttccaaaagtctttatatcttttatcttgttttattggatatgaaattatattctctggattattcttagcttcttttctaacctgacctgcgctcttgccattgaagcgctcctgaggatcataattaatatagtattcaatacttgctttaaaggctttttccatctcttcatagctatttgccttcggataaagaacttctcgcatttctttaattaaaccttgccagccttccattgggccattatcaatacagcggccaattctagacattgattgtggcatgccatgttcttctagctcatgcttaaaaggcatcctggtaaattgaaatcctcgatcactatgaagcattgcatgactattgggctctcttttccaagcagttgacagagcagcgttaactagggctgtatcattgcgcttgcttaaagcatagccaacagggaaacgatcatatagatcaaagatagtacagagataaatcttttgacttgttccaggaattttttcttcagtaatgtcagtgcaccatttttcattgggtttagtggcattgaagtctctatgcaatagattttcggcagtttcttccggtctagcagcttgatagcgatacctcttattaaatctggccttgctagtatagatgccattcacgcacatcaagcgagccacagttctacggtatattttggcctcaccgtctgctagctcattgtttaaagccaaagtcatcttaggagaaccaaagaggctgttattgctctcagctatttctttaatacgcttaagaatcttttgatctcttagttcacgtttgcttggcttatgattaagccatttgtagtaggctgaccgggcaatattggcttgtttgcacatccattcaattgaccacttatattctcggtgacattctttgatcaaactgtaaagagaatttcgctgctgttgtttaagtgctatttgtctttgttttggctgtccagcaaacacatcctttctaattccttcactttttttaggaaggctatctcttggtctttaatatcattttcttttttaagctgttcaatttcacgctttagcctttgagtttcagatagctcagcttcttttaaacgatgaccgcgcctatctgctaagccgtcagttccctttgcgctgtatttttttgaccagttgtatacttgggcatagctgcagccaaatttaagagctgcttccttgtagttccattgatgatccttgcagtatttcactatctgtttacgttcttctagggttgtcttttttctcttagtcatataagcctccagaataggattgtagtccttgagttcttgatgactattatacttgataacccactgctttaactgtgcagcacttcgcaaaccaaacttatttgttagataatcatatgagccttcgccatttaaataggcagctatgcatttgagtttaaaatctttactgtatctttgattatatttatgtggtcttaatgcttctggcccatgatctttaaatgcatatacccattggcgcagtgtagtcttgccagcccctaaaactttcgcaattgaagcaggtgatgcttcgccacttatgtattgtttaactgctttaagcttagcttcatagctaaatttactttttctagacatacaaaaagtcctgctttcatagatagtacaattttatatatttgtactgtctactaaagtaggactatatcactatgccaggtctaattagagactgtaaaatagtttgtgtaaggatgaatgattccttaaatttatttctttaaacattagaaaaaggagttcctttctcgtatgattggtttgaacaaaaaaacacatacagaaagaagaactccttcatgaatgattttaccaaagattttgctcaagctctattcaatccagacaaaataaatgatttattgcgcaaagagctacaacaggctgttaataaattgctagaagctgaattgactgcctttctgggctatgatccctatgccagaaatggctggaatactggcaactctagaaatggtgcttatttccgcaaagttgatacgcaatttggcccaattgaagtgcaagtgcctcgggatcgcaacggtcagtttcatcagcacacgctgcctggctacaagcagcactcggatatcttggaaagcatgattatcaagctttactccaagggcgtgaccaccagggaaatagccgatctaattgaaaagatgtatggcagccattacagtccagctcaggtatcaaatatttccaagcagatgattccaaaggttgaggcttaccacaaacgcaagctaagcgacaagtttttctgcgtctatttggatgcgacataccttcctttgcgccgagaaacatttgagcgtgaagcagtctatattgccattggcatcaagcctaatgggcacaaggaggtcattgactactgcattgcacctagcgagaacattgaagtctggacagatatgcttcaaaacatgaaatcccgaggcttaaagcaagttgagctttttctttctgatggtgttgttggcatgaaaacagccttggccaggacttatcctaaagctcattttcaacgctgtttggttcatgtcatgcgcaatatctgcgctaaagtacgcgtcgacgatcgtgaaaagatcatgaacgaattcaaacaggtgcatcaacagacaaacaaagaagaagccacagctgtcctgcatgacttctataccaaatggggcaaggtttacagccatgttatcagaagcttgaaagacatagaaccagatctgctggtcttttataactatcccaagcagatcagagcttcaatttattcgactaacatgattgaatcatttaacaatgtgatcaagcgcaaagctaagcctaaggcagagtttccaactgaacagtcgcttgatgcttttattggcattcaggcaatgagctacaatgaccgttatttcaatcgaattcataaaggctttggtcaggttcaggacaccttagaatcctactttgattaaataaataattaaaaaatcaatttacgagaaagatctatttacacaaaagatttgacagtttcaaaagaactgtcatcccctttaacttttatgaaatattttaatgaaataatgaaaataggagttatataaggaaaggtgataaacttgaaaaataagctcattatatttatgacaactgcgctattcatgttagctattattgtaatgggtcaaaatagagtagatgctgcatcctggggagctaagaatttatttactacaccaaaggaaactcgcggaacatggtactataagcaagaaggcaaaataaagaagcttaaaattacaacgcatacatttaataaaatcaaattatataaaatgttgagcagtaatcaagcgattaagtggactaaaaaattagctaaaactgataaaaagtcggggtataaattagctcaaaaagttggtacctctcaatacgaagctactgattttaaattttataaaacagcaggttttgctgccaatggttggctttctagtgatagagctgattcaggacacacttatgttgctataaagaaaaaagataaaagtaataatgataaagtagatgcactgcgagtaggaaatggagcagataattcatttttatattattgttataagagcaaaaaattaatcaaataagttacccggatttaaaattgaagtgcaacactaagtgttaaacaaaaaggccatgaagacctaaacttgaagtgaccaaaaatcaagaaaggaagatcttcatgaccaactcaaattctagcatttccaagcattatcatcaattgaacagcgaacaacgtaagtgtcaatgtttttgcggtagcctttaaaccattagtctaaccttaatttcttaaatatttatatgacttaaatttctgcttagcttgcttaaataactattgccagctacctgtgcggttaatgcgccatgctggatgcctaaatgaacttcatgacgcttctttaagctgtcacgggccgctgcttttaattcctgttcagtcaatacagttatttctgaatcttcaaactcgctgctaagccaaaattccagctctcgattcttgatgcagcttaagatcctaagcatgccttctgctccagattttgaccatttcttgccttgccccttaacacggtaggtatacttgcggtggttgctctcgcagcagccaatggctttagtcacagtcagttttcgtttcttaaacggcttaatatcgtcccaatgacgatcaatataattccttaggcgccccagataatcatgattgagctcggtattcaattcatcaattagtcggctttctgcagtggttaggatagttttaactttgtcatagctgtatttgtattccaaagcagaaatcagcttgccttgcaggtcaggcgcaaaatatagcctttctttgattttcttatttaggtgaaagacatccaagaaatgctcatgacgcttgcatagccctacaatgtcatcgaagtctgttttggcatatccagcaccgccatcggcgttgctaagaattacagtatcagaaagatcataagtattggccaggtactccttggcttcgttcagcgcatcaagtcggcttaaagaaacaaattccttggcattgattcgctttctgcgtttcttgcttatattgacaatgccttcacagacctgatagcgatgaaattccaaccggcttttaagtgcctttgatcaccacgccatcgccttcaagatacaaaactgggacctttttcttagtgcctgcggcatcatatcttgaatctgcttcttggcccgctttaatatttttctcggccatttttaccaaattgcccacctgcatatggctaatattaaagccagacaggcaattgactgctagagcagtattgcgataagtggcaacgctgcttacttctaagatgtttttgactgctaaaatactgtagcgcttgtatttgtcaaagcccattaattcatccaagggataccttgcttgtttgcctgggcagacatatcttcttctgacatacctaacttcgccaaaagccatattgattgagcgctcattcttcttatcaatctgatagccctgtgctttaaccttggtaatcatttcatcatcaactttagctaaagccaaggccatgatttccttaatcaggtttaagaagaaacagattatttttctttcacgcttaatataattatcttcagactttataatatttgcgatttcagttacaattgaattcataaaagaccagcttctaatgtgttttttgttcttaacatcagactactggtctttttgtttgagctcaagtccaaattcaaaggacttgggcttttttaattatttattcaacttaccgtaaaaaattatacacttaggcgaacaacgtggacaaattcaagctctgcttgattctggcataacctcctgcaatgctatcgctcaagaagtaggctgtcataaatcaactatcagccgtgaaattagacgaggcagtgtcctgcaaagagacagcagctatgtcttgtatgagcactattacgctgatactgcacaaatttatcatgaaaagcgccgcagaaactgctataagtgtaatccactgcaacactatgccgtctttttcagaatgctaagcagacgctttaaagccaaatttgatgccaccagcattgatgaattcgttggtgaatttcacaggattatgccaaattatccatgtcctagcacgcccactgtctatcgttatattgatcaaggattgctggatataagcaatatcgacctgccaatgaagcttaaaagacgcagaaacaaacgccatcatagtcatggtggccatgctccgcataaaaagaatcttggcaattcgattgaacagcggcctaaagaagttgaaaacagaaaagttcccctgcactgggaaggcgatttggttaaaggcgtcagacgtaaaaatcaacctgccttaatgacactgactgaaagaaccactcgttttgaggttgttatcaaaattcctgactatcgggccagtacttgtcaaagactgcttcaaaaggagattgacagacatcctaattggtttaaatcaattacgtttgacaatggttctgagtttgcggatatgaccaaaatcaaaggatgtcagatctactttgctcatccatattctccttgggaaagaggcacaaatgagaactgcaatggacttctgcgtcaattcttccctaagggcaaaagcatgaaagataagtcagctgcttatgttcaacaggcaactgatgccattaaccgcaaacatcgtcgaatcctccaatatcacacagcagaagaactcttcaagcaatacgttccttcatagcctaactgttgcacttaatttgacaattcaggatcaaataagttataataattttattgatgtgttcaactacatttttatatttttgcactgaaatcttaattcagtgcttttttcataaggattagactaaataagatgataatacgccagcgaaaaaattatttaacttctcaatttttatctaagattagtgccgatgggactttaaatattgaaaatttaattgtcctgacttgtgcaatttttattgcaagtgttggactaaatgttaattcaacagctactattattggcgcaatgttgatttctcctctgatgggaccactactagcaattggcacaggtcttgctttatatgatgttcacttactgcgtaaaggaacaatttcattattagcagaaattattatcagtttagctgcatctacaatttattttcatttttctcctttgacttatgctagtcaagagattattgcacgaacttcaccaacaatctgggatgcgatgattgcgttttttggaggggtcgctggaataatcggagctcgcaaaaaagaagcaaataatattgtacctggtgtagcgattgcaacagccttaatgccaccggcttgtacgatagggtattcaattgcggcaggtaatcttaaatattttttaggatcaagctatttatttttgattaactgtgttttcataattttgactgcattcatgggtgtaaaaattatgaagtggttaagttattctactaagcaatctaagttgtttttcttgcacaagccgacctttaaagagtttgtgataattttagtagtaattattttaattattcctagtatcttgtcagctaatcagatggtgaataaaactctagtagatcaaaatgttcaaaatcttgttgttaatgaattaggcaatgttaatttaattaaggaaaatgttgatacgcaaggaaaaataattaatcttacagtttcaggcgataaaattaacgctaagaaaattcaagcggctaaagcaaacttaacaaaatatgacctgaaaggctattcactgaatattgtacaagtagctcaggttaatcccaatgcagaaaatcaattagatcgacaagtaaataatattattaatcagcgtcagcatgaacaagaacaagctgatgaaaaacgtcaacaagaacaagaaaaacgtaatcaaaaaattcgcaaactgtcatctgcaatatcttctgttactgcagttagtgataataaaaataagcaaattactttgatagagttaaaaaagccgctatctaagaagagaaaaaacgccttagtaagacaaataaaagataaatatccaaatattaatttagtggaatttgttcaagaaaatattaaaaattagaagaaactgtcaaattttttgtgtaaatagatttttctcgtagattgattttttaatcttttatttaatcaaagtagaattctaaggtatcctgaacctgaccaaagcctttgtggattcgattgaaatagcgttcgttgtagctcattgcttgaatgccaataaaagtatcaagcgactgttcatttgaaaactctgctttaggtttagctttacgcttgataacgttgttaaaggattcgatcatattggtggagtaaattgaaaccctgatctgcttaggatagctgtaaaagaccagcagatcaggttcaatctctttgagatttctgatgacatggttgtacgctctgttccacttgtcatagaaggcgtgcaagactttgatcgcagcttctttatttggctgttgatggatttgcttgaattcattcatgatattttcgcgatcatctacgcgtactttagcgcagatattgcgcatgacatgtaccaggcagcgttgaaaatgagctttgggatatgtcttttccagtaccgtcttcatgcccacaacgccatctgaaagaaagagctcaacctgttctagaccgcgagacttcatgtcttgaagcatttccgtccaattctcgacgttttcgctgggagcaatgcggttaatcgatgacttccttgtggccattaggcttgatgccaatggcaatataaactgcttcacgatcaaaggttatgcgacgcaaagtaatgtaagttgcgtccaaataaatacagaagaacttatcgctaagcttgcgttgatgataggcttcaacttttggaatcatctgcttggagatgttagatacctgagctgggctgtagtgactgccgtacatcttttcaattaaatcggctatttctctggtggttacgcctttggaatatagcttgataatcatgctttccaagacatcggagtgctgcctgtagtcaggcagcgtgtgctgatgaaacatgccgttgcggtccctaggcacctgaatttcaatctcgccaaattgcgtatcaactttacggaaataagcaccattgcgtgaattgcctgtattccagccagctctggcataaggatcatagcctaaaaacgcagtcagttcagcttccaataagtcattaactgcttgctggagttctttgcgcaataaatcgtttattttgtcttgattgaatagagcttgtgccatatttttggtaaaatcattcatgaaggagttcttctttccgtatgtgttttttgttcaaaccaatcatacgagaaaggaactcctttttctaatgtttaaagaaataaatttaaggaatcattcatccttacacaaactattttacggtctcattatatctgtatattaatgcacaaatgctgttatatcaacgattagatacttcgctttataataaacagtgttattataaagatgccgagagggatagaggcaataaagaattagaatcgaaaggtgatatatatgttagatgttttaaataacaaagtagaattaagcaacgtacattttgcagaacacaaattagcaattgaagatgctaaaacaatgttagaaaacgaaggttggattgctactaagtaaaaagtgttgataattatgaaattaaaaacagaaaatgagacgcacgataaagtacctcataactgctataaattagctagtagttatgagtcgttttttattttttgcttgtatatattggtttatcgctaatcctatatgataatgatatccaaattattaaactataataaaaatatgttattttaatttgacataagttgctatataatcaaaaagaatcgttaaatttttattatttgtttggaggaatatgatatgaagaaacgtttcaaattagctgctatttttgtggctgcaatgttcgcagttgcccctgttgttggtatggcagaaacatcaactactgtttcagctgatgctgacatcatgcaacaatacacttttaatgactcaggtttggactttactcctactttaaaggtttatattgctaagggtcacaaatttaccaccagtaaagaaactgcttacaaggcaaaataattaggattgattccgaaaatatagagctgttagatttaccgtggtctagcagcttttttgatgcaaaaaaataccactcaccgttaaatttagagtaagcgtcatataaccgagtatcttttttagtccgtatttttcaggtattctaatctcatcaatttaatggaggttaagaatatgatcgaacaacaacaacccattgtggcacttggccgttcttctaaacctaagaaggctcgtccaccacgcaataatctgttgcttagtttaaagaagaatgacttagagctgaatttttacagcagcttagaccctgaaattatgaataagctgcttgagaaagtcttgccatgattaagctcagtgacttagggcaagtctatatcgtttgcggcaagacggatctgcgtaaaggcattgatggactagcaactttagtcaaagaacagtttgaacttgatccttttagcggcaaagtcttcctcttttgcggcggaagcaaggaccgcttcaaagccctttattgggacggacaaggtttttggctgctctacaaaagatttgaaaatggaaaattgaactggcccaggaatcaaaatgaagttcaagctttatcttctgagcaggtcgactggctaatgaagggcttcgcaatcaatccaaaaataaagaacacgaaagcgtgcgaattctactaacacttgacatcgcacgcttttttgatattcttttaactaataaatttaggaggaagtttaactcatgtcacaagaaaatttggaaaagattattgcacaacaagcaactactattcaaaacttaactgatgaaattaagctcctccgtgaacaagtagcttacttaacgcaaaaacgttatggcaaatcttcagaacaaatgcctttaaatggacaaacaagtctctttgatgaacctgatgctcaagatgacggagaacgtccccgacgccgccgttcagactattacttataaaagacaagctcacaaacgaaagcgtgctgacttactagctgcccttccagctgaagaggttcaccatgaattaggcgacaagcattgtcctgattgtcatcatgaactgattgagataggcaagcagtcagttcgccaagaattattgtttatcccagctcaacttaaaaggttagaccatatccaacatgcttacaaatgtaaatattgcagtcaaagaaatcttagcgacaagatcattaaagctgcagtacctaaagctcccctaaaccatggtctaggttcagcttcactcatcgctcattcactttatcaaaaatatgaaatgaaggtgccggactatcgtcaagaaagcgactggaagaagatgggactagaagtttcaagacagatgttaaattattgggatttgaaaagcagtcaatactactttaaaccagtgtatgatctgcttaagcaaaagctgttaatgcggccaattttacatgccgatgaaacttattatacagtcttagaaagtaaaacaatcaagacttactattgggtcttcctttcaggcaaacatgatcaatacgggattacactctatcatcatgatccttcccggagttgcaaggttgccttaaactttttaggaaactatcccggttatttgcactgtgatatgtggcaggcttatgagcaattgccgaaagcaactttagttggctgctgggctcatgttagaagaaagtttcacgaagccgtaccacaacaggcttctgaaaagtcccttgcccaaaaaggactcaactactgcaatcgcatgttttacttagaacaaacctgggagaatttgagcaaacaagaacgttaccagctaagacaagcaaagctcaagcctctgatgcaagagttcttcaactggtgtgagaaaaataaaatcaccgttttgccaggctctaaattgggaagagccattaattataccctcaagcatcaagctacttttgagcatgtcttgcttgatggcaatttagaattatctaacaataaggctgaacgcgctgtaaaatcactcgtcatgggccgaaagaattggttattttctcaaagttttgagggtgctactgcaagtggctttattctaagcttaattgaaactgccaagagaaatggccttgatcctgaaaagtacttgaattatttgcttcagaaattaccgaatgaagagattctggattcggaaacccttgaagcttatttaccgtggcaagagaagatccagataaattgtaaataaaagaacttaaataaccgtctcagtataacagtaactgggacggtttttaagtacactattttatttgacgcttacaatttagaccattcacctgaatttaataatttaacgaaaataagcaggtatactaataatcaatcaaggagggatgcaattgaaagttaaattgaatatcgatccaagtttaccagaagaaaaagctgaattttggttaaagaaaatgactgctagatttgaacggattactaaagagttgaattcggagcaggattttctttggtgctatctagatggggatgcctatgaaattaatttttctcaaatctatgcaattcaaatagaaaatgaaaaaacaatgatttgtactcaaaatcaaaaatatgtttataggggcagattgtatcaagtacaaagtgttctacctaacgattttataatgatttctagaggtgctattgttaattatcattttattgatcatctagaaattataaatacaggcaatattgatgcgcttttggagaatggactaagagtacaagtttctcgtagaagaataaaggatttaaaagagaggctaggattatgaaaaatattaaagatcttttatataacggtctgattagtggactgattggtattggtatcggtacgatctggatggctatggacttcttgttttcactaaatggtcaaaatcctgcaacagcgaagatatatttgaaaacctttcttttttggacgattatttcttttctcattggtattttcttttatctagctagctggatttttaatagtgaaaaatggtcattgaaaaaacaaatttttattaatttcttcgtctgttttgttgcctggttcttgttaaacctcctaattgataattttagtatttcactaaagatggttattagagtaacagttgattttattattatgtacgctattgcatacggtggatattttttacatttatggaacactgttagacgaataaatgcaaagttaaaggaaaaatagaataccataattaaaaaatgaaagaggtacccttgcatgactttattatctgtaaataatatttcaaaaacatatcaaaaagcacataaaaaggcggtatctgatgtttcatttaatgttgatagtggtgatattgttgccttcttaggtcctaatggtgcaggaaaaactacaacattaaaaatgattcttaatttagttagtcctgataaaggaacggttgtattcgacggaaaagatgtaactcacaacaatctctttttattgaaaaacactggcgttttattagaaggatctagaaatatgtattgggccttatcaccaatggaaaattttgtttattggggtggccaacgtggtttaagcaagaaagaggcagaaaaaagaggagaaactttcctcaaacagtttggtctgttggataagaaatacacctctattatcagattgagtagaggtatgcagcaagttgtgggaatttgctgtgctatgattgccgaaccaaagcttttaattttagatgagccaactttaggtttggatcttaatgctactcaaataatgattaagagtctgaatatgttatccgccaatggagtagggattctagttactacacatcaaatggaatttgctcaagagatagctaataaaattttattaatcaatcatggtaaacttgtcttttctaatagtataaaagatagtttgaagaagctgaataaacaagaaatttttgaagtgcatttcacccaagaacttaccgcctcagaaaaagaggatatacttgcaagctgtgaacttacaaagaagactgacggagtttatcgtttgggtgttaaaccgcaagcatctctttcacaagtacttaaattattgagtgaattaccaataagtagtatacaaactgtgactagaggattagatgaaatttttaagtactacacggagaaggaaaaatgataagttttaaagctgaattttggcgtcaattctatttatataagagatacctcttcaattatatttcagaatttttcttattaattttaatgtttatggctattttttggggcggtagccttgtaggaggtggcgttttaggaaaatcattgaatgccctagtagttggctatgttttgtggagtttaattgaaaacactattagccaaatgggatcaacagtgatgaataatgccaaaagtggtattttagaacaacaatatcttatgccaatttcttctagaagattatttttaaataaaagtattgcaaatattgttgtggcattcgtccaagcaattttaattctgatagcagtaatggcaatttctgatcactggattagttttccagtaataatgattgttccatttatattagctttactaactacagtgggattaggctatttaattgttagcttagttttacgttttaaaagaattggcagtaccttagtgatttttcaatatatttacttaggtatactactagttaattttgaaaactactccaatcttacaaaatgcttatcttgtttattgccaatttgtccaatggttagttggatgagattagcagttaacaatcgaccatacaatttagcgttttatttaagcgaatctatctttaataccgtattatggttgattattggattgctagtatttaatttagctgataaatatgtaaagaaaaatgggactttatctttttattgattttagttgctaataaattcattcatccctgaaaagtgattcttgcccacaaaaattccaaggaataacttctacttatgcattgttctgtggtagaaacgctgtaaagtttgtggctgcagcttgggtaaataataacgatcttcatgtttaaaaaatgaagaaaaaagttttatcatttattgccgcttttttagttgttttaggtttggctagcgttcatgcaaacacagcaaatgctgctagttagggtgctaccaaacttttcaccacacttaataatacgcgtggtgtttggtaacacaaagaagctggtaaagttattagaactaaaattaccgcacatactattaacggcctcaaggtttataaggtattaaagggtaaagaggtagataagtgggataaaaagttaactgctgctgatgaaaaggctaactacaaattagttaacaaagtttctagctcacaatttgaagcttatacctttaaatcccacggtattacggtttttaacgcaaacggctggcttgctggtggtggcgacggctactactatactcatatgaagaagaccgttaagggtaagaaagttaatgttttgcgtgtcggcggcggtgctggcaactactttatcagctacgcttacaaggataagaaattagcgtaaattgcaataataaattgaacacttaagctgcttgatagattttgtctaattttctttcaaagatttcatctggtgtgtgatatgccaatagttttattggcaatgaattacaccaggttcaatatcaatgatttcttgaagagaatagttattgatgtagtcatctttagtaatgaatctgcgaataaggccattatgtctttctacagtgcctttatcacaagaagtatacggatgagcgtaatagactaaagtgttagatactttctctaagttggatagatccgcaaactctgagcaattgtcagttgtaattgttttaaaaatttcattccagtgatcgctatattgactgtgcaaggattgaaaagctgacattacactgttagccgttttatccggaatacgtatgatcaagagctctcgactcattcgttcagacaaagtttgcagcacttgatcgtctctagtcttatgtcctaagactaggtcacattcccagtggccagactcttttcggtcttaaatcactttagggcgctcttcaatgcttcgacctagtttctttttgtttttacggacacgatgaattttagtgttacgctttaattttttgggtaaatcagagtttctgatagccaataggccttggtatacatagttatacaacgttctagtatggaatgtttattcgttgctaaattttcctatagccagacagcgattggcgcatacatcaagcgaccaattattttcaagaagtgcttaatgacatacttaataaagtcattcttctttaagaaatctgacttgcgaccgcagcgttgacgattcaagttgtaaacttcattaccatgctttatatcgcttttgcttgccattataaagcaaaactgtgccacgcttaacttcataactgatcgtagaaggagaacagccaatttcacgggcaatagctctaagagagaagccatccttgatacgagtttgaataataactcgctcttctagtgataaatgctttcccttttcgtgcttaggcatgatagaatgtaaagagtccatttgtgacctcgtttctgaatgttttgtggtaattacattctatcaaacaggtccagatggactttttatttttcaaaaatgttcaacttaattttacaatcggccaaatagaaaatatgttaagtattaagaaaattatttttcaaataaaggcactttcttttgtgatttaacttcaaaaagacctttatcagagatttttagactaggagaaacaagtaaagacaaagtagagaaagacataatttcgtttgtatttttatagcccaattctacgagatttttacgtatattaccaatttgttctcctaaaatcttcattggttgattgcttacaactccaccaattggaagaggagcattagctgcaatcttttcacctctggcgactatataaccaccttgctgattaattaattgatgttgaatgtcaatcatgccatctatatttgttcccattaccatcaaattatggtgatcgtgagcccaggttgcccctacagcaccatcaccaataatgccacgatcaactaggcctaagctaaatttaccatcatttaaaccatatctttcttggacaataattaaagctaaatttgcactttgccaatcaacgatatgattatgtacagctagccttttttgaatatgatttgtaaaagtaccgacaggatttatttgaatgacatttgctgtaactgagccattatcaacaagatttgttttaagtaatagatcttgtttagttaatttaggagctttcacactagtagttagactattaggtgaaaaatcatcttgagaagtatttttgatagtctcttttgcggatattccatttttatagacatcagctattgagagttcttctaaattatccagaatggagaaatcagcaactcttcctggtgcaattgcaccacgatcccataatcccatatgtcttgcaggaatataggtagaaatataaatggcgtcttctggcttcatccccatattgattgcttttttaactaataaatttaagtgaccttttaacaaagtatcaggcattgaatcatcagtaactaaggctacatgttcaaaatatttattatcaataatagtattgatgacatctggatgcatggattttaattgaacttcaacaaacaccccgtttcttatcttttcattgactaaatctccagtttgttgagtatgatcagtagtaacaccggcatataaaattttagctaaatcttcaccatgataagcaggggtatggccttcaattggcatagtaggtttagttttatgacaagtattaattatgtccttaattagagtgtccttgtcagaagtcatatctttaaagttcatgacttcacctaagcaaataaagcgtggatctttaagtaattcttttacttcaggcacaccaattttaccgccagttgtttccatttgaggattggttgaaggaacagaagaagggatgccgaagaaaatatcaattggcgaatcttcattaatgaaatcttttaatccattaataccggcgacattagtaacctcatgatcatcagcaataatagtagtcgtgccatattttagaattgtttcacccattattttaggtgtagtcattgagctatcaatatgcatatgggcatctacaaaaccagggattaaatatttaccttgtagatcgatgactttttttgcttttaaattaggtaattctttattaatccaatagaatttgccatttttaatacttacttgaacatcttgaaattttcgtaaatatacattaaaaacatgagcatttttgataattaagtctacctcagtcatttaaaatcctccataaaagataaggagctgaatctacaattcagctccttatagggaataaacatcaattatttattcataatcttattccatcttgaaatccagttagacatatgtgaatttacaaagaagaaattaatagtttttgctcttttagcaactgagccataagttttgtttgctgcttctgcaggtgttaatttaacttgagtgtttacaggagcgttgttcaaagatttaagacctgctactttcttttgaattttttcgcttaatctaaagttgatgtatttgtatgcagctgctgaatttttactattctttaaaatagagacattatcgtagttagcatatgtaccagacttaggaacgatgtattttaagttgggattagttgcttgaagcataccaacagcataatcaccaactacagcagcttcaatttcaccagatttaaacatgttacttaaatctgaactttgggtgtaagttttgacaacattaggttttaattctttcattgccttaaatgctgcatttccgttgtctttagttacactagtaccagcatagtcaccagcaatatataacattgcagggccaaaagtagttgtcatatcaggtacagcaatcttatttttaagtttagatgaccataagtccttccaagaattaatattaactttctttggattatagataatacctaaactgtttacggtataaggaaccgtattagtttctttagctagtttttgttctgattttgataaatatttgaaattggaaatcttagagaagtctaacttcttaaataacttctttttatcgccagtaacagcattgttttgagcaagttcaattacatcaacacctgtattagggttatgttcaatttgagtaagtcttgttgcactatcaccaaattgagtttttactttaactgatgattgtttagcaaaaggatttaaaacatcgttctgcatttgtttggtagataaaccaaaggttgaaacagttaaatttcctccgttagaagatgatcgtgatgaacatgcagttgtaccaaatgcaactgaaccaactaataaaaaacttgcagctaataaaccaacttttttaaaattcatttttattcctttctttacaattggttatctagacaacggatgaagatgcttggagggtaaataaagctgaactttatctcctgagctacgcatcgatttcctagactcttcaacagtgaagtctccgagactagtacttaccttatatttaaagctctgacctaaatactcaagactagtgattgttccatcaatcaaattattagacggattttcttctgaattaatcaaaatattttcgggtctaatagttaataccttagcttgaatattattttcatcagttaagaaaacaagatctttacttttaatttggcgatcattaataatttcatcaacattgatgaaattatcataaccgatgaatctagcaacatattctgaactagggtggtgaaagatgttttcaggagtatcatattgatcaattttgccatctttcatgattaatactttatcggaaatagcgaagcattctctttgatcatgagtaacaaaaagaactgtcatttttagcttttgctgcaattctctaatttcgctacgcattttaattcttaattttgcgtctaaattactcaagggttcatccatgagtaataattgtggattgactaccaatgcacgtgctaaagaaactctttgttgttgaccaccagataattctttaggatagcgagaagctaatttagacaagccggttatttttaaaatttgatcgactcttttttgaatgtcacttttagacatctttttcatttttaatccgaaagctacattattaaagacggtcatatgtgggaataaagcgtaactttggaaaaccattccaaagtttcttttgtaaactggtacttttccaacatcttcaccatcaactaaaacttgtccgtctgttgctggaattaaacctgctatgattcttaaagtggttgttttaccgcaacctgagggtcctagaatagatactaaatcaccgttttttacggaaaacgaaatatcttttaatactttggttttaccgttatatgattttgctaaatcttttacttctaaatttgccaatttaattgctcctatcagtaagtttatttagaccaactagtttttcagttaaaagcataattaatgctgtaaaaatcattagaactacagaaatagcagaaacagttggatcatagttgttttgtaaatagttcaaaattgctggtggcagcattgtaattgatggtccattcatgaacaatgaaattggaatattattaaatgaattaataaaacacatcataaaggctgctacaatacttgctttaatgttaggtaaaacgattaagaagaatcctttctgaggtgaacatccacaaacccaagctgcttcttcaatatttttatccattagtaacatacttgctgtaactagtcttattacataaggtaggcataataaaaagtgaccaataattagactaggcataacaggtagtctaagagtaacgacagcagcttgatataaggcaaagccaattacaatttctggaattagagtagggcttaagaagaaagagtgaaaccaagacttatgaacgatgttgaatcttgttaaagcataaactgcagggataccaattattaatgccgaaagactagcaataatggcaacgaacaaacttgattcaaatccactgataaaatctggttgctgaaaaatattggcataccaggataaagtaaaacctttaattggtagagaaattgaatcctgattattaaatgaagtaataattactaaaagtagaggaaacatcaataatatcaggataataatagaaataattgctaaagttttatttttacgattaagcattaatattaggtctcctatccaaagcgcggagactgtaaaatagtttgtgtaaggatgaatgattccttaaatttatttctttaaacattagaaaaaggagttcctttctcgtatgattggtttgaacaaaaaaacacatacagaaagaagaactccttcatgaatgattttaccaaagattttgctcaagctctattcaatccagacaaaataaatgatttattgcgcaaagagctacaacaggctgttaataacttgttagaagctgaattgaccgcctttctgggctatgatccctatgccagaaatggctggaatactggcaactctagaaatggtgcttatttccgcaaagttgatacgcaatttggcccaattgaagtgcaagtgcctcgggatcgcaacggtcaatttcatcagcacacgctgcctggctacaagcagcactcggatgtcttggaaagcatgattatcaagctttactccaagggcgtgaccaccagggaaatagccgatctaattgaaaagatgtatggcagccattacagtccagctcaggtatcaaatatttccaagcagatgattccaaaggttgaggcttaccacaaacgcaagctaagcgacaagtttttctgcgtctatttggatgcgacataccttcctttgcgccgagaaacatttgagcgtgaagcagtctatattgccattggcatcaagcctaatgggcacaaggaggtcattgactactgcattgcacctagcgagaacattgaagtctggacagagatgcttcaaaacatgaaatcccgaggcttaaagcaagttgagctttttctttctgatggtgttgttggcatgaaaacagccttggccaggacttatcctaaagctcattttcaacgctgtttggttcatgtcatgcgcaatatctgcgctaaagtacgcgtcgacgatcgtgaaaagatcatgaacgaattcaaacaggtgcatcaacagacaaacaaagaagaagccacagctgtcctgcatgacttctataccaaatggggcaaggtttacagccatgttatcagaagcttgaaagacatagaaccagatctgctggtcttttataactatcccaagcagatcagagcttcaatttattcgactaacatgattgaatcatttaacaatgtgatcaagcgcaaagctaagcctaaggcagagtttccaactgaacagtcgcttgatgcttttattggcattcaggcaatgagctacaatgaccgttatttcaatcgaattcataaaggctttggtcaggttcaggacaccttagaatcctactttgattaaataaataattaaaaaatcaatttacgagaaagatctatttacacaaaagatttgacagtttcaaagcgcgacttgcttttctcattaatatcattgataaagcagagataataatcagaactattgcaataacacttgcatttttccagttacctaatgtcatggcttgttggtaaatcaaggtagacattactaaatttttattacctcccaaaatttgtggggtagtatatgctgtcatcgcacctgcaaagaccaaaatgcatcctgttaaaattcctgagactaattgtggtattacaatttttatcaaattaacccatggattggcgcctaatacagcagcagcttcttctgcttcaatgtttagctcagaaatactaccaactaatgaaataatcataatcgggagaaataaataagctgaaccgatgataattgccgtatcagtataaagaatgtttaatggagaattaattaaatgaatagacatcagaaatttatttagaataccgttacgacctaaaataatgatccatgcaaagtttctgacaactgcattcgttaacattggaaaaagaatgataattgttaaaattgatcttactttgctcttttgacgagcaatccaaagtgaaattggaattccaagaattaaaacaatgatcatagtgagtaaagcaattttaaatgttctaccaattacatgaagattgtacgtgttttttagaaattcagtgtataggtgcaaaaatcctttagaatcttgaaatgttggtatagcaatctgaattaatggaaagaatgcaaaaatcaagacactaataaatgccggaaatagcagccaaaaaccggattttattttcatattgttcgtattcctccttatcttgtcttagaataatttaaatgtaaaaataagtcaatacaaaatatgaattaaaataatagcatttgtgttaattgtatgcgtattgtattatttatgaatataaatagatttatttataaatttatctttttaaaaatacgaacattaccaaaaaggaagtggagttcttaatgaaaaagccagttattattagtacagatccaggaatagatgacgcagttgcattagcaatatgtcttttttcgcctgcaattgaagttaaaagtattattgcaactaatggcaatgttaatgcgcaacaagctttaataaatatattgaaattggagaaatttttcggtaaaagtattcctgtagtaaaaggggtagagcgttcattagtcaaacaatctattcgagctaaagaaatacatggtaaatcaggaatggacggatatgattttccaaatcctagttttgaattggtggatcatggcatatcaccggttgccatacataaaatagttgcagcttcttctgaaaaagtaactcttattggaattgcaccacttactgattacgctctatatgttcgtttatacccagatgatataaaaaatattaaggaactaattattatgggaggagcaatgggtagaggcaattatggtatctattctgaattcaatattgcatctgatcctgaagctgcaaaaatcatttttgaaagtggattaaaaattagagtagcgcctttagaattaggtgcacaagctaaaattatgcctgaagtaagtaatcaaatacgacagttaggaaaagctggtgatatgttttacgacttatttaagaaatttcgaggtggcagttttcaaactggccttaaaatttatgatgcacttgcagcaggcgtacttttaaatccgcaaatgtttaaatttaaaaatacacatgtagaaattgatgttcaaaccggttatacatatggtgcttcattgatggattttaaaaataagctagatcttccaaataatgctgaaatagcagtgtctgtagatccagaaattttttctaaatggtttgtagaagctttatcaaaaacaagataaaaaagtcaattaattgtcaacaattaattgacggataatggttaagcgagtatactactactagttgagaacaagaagaagcacccgcttctcgcctaagttaagtaaacctctaggctgatcgataatttctgttgattaaaggcgggtatgaatcttataacccgcctttttcttgtcctcaaattaacacggaggtgaacagttataccaagaagtttaatcttaaacgacagaattcgcgctcgcgaagttcgtttaattgatgaagatggtcagcaagttggtgtgatgagcaagagcgatgccttacgtcgtgcaagcgatgcgggtcttgacttagctctgatttctccaaatgctaagccacctgtagcacgtatcatggattacgggaagtaccgctttgaacaacaaaagaagcttaaggaagcccgtaagaattccaagacagtcagtgtcaaagaaattcgtttgagtccaactattgaaggtaacgacttcgaaactaaacttaagcacgttcgtaagttcatttctaaagaaggagctaaggttcgcgtctcaattcgttttagaggtcgtgccatcactcacaaggaattaggtcaacaagtacttgaaaaaatggccgaagtaacctcagacattgctaatgtaattagtaagcctaagatggaaggtcgttcaatgttcttgatgcttgcacctaagagtgataaggacaaaaagaaaaagtagttaattggaggaaatagaaatatgccaaagatgaaaacacaccgcgcttctgctaagcgttttaagagaactgcaaatggtggtttaaagcgtcaccacgcatttactggtcaccgtttccacggtaagacaaagaagcaacgtcgtcacttgagaaaagctgctatggtttcaaagagtgatatgaagcgtatcaagcaaatggttgctcaaatgcactaatacttgttcttaattaagacagactatagtaggaggaattttaaatgccaagagttaaaggtggaacagtaacacgtcaacgtcgtaagaagatcatgaagcttgccaagggttaccgtggcgcaaagcacatgcaatttaaggctgcaagcactcaattattcgtttcatacaagtacgcattccgcgaccgtagaagacgtaagagtgaattcagaaagttatggattgctcgtatcaacgcagctgcaagacaaaacgacatctcatattctaagttaatgcacggcttgaagttagctggtgttgacatgaaccgtaagatgttagctgatattgcttacaacgattcaaagacttttgcacaattagcagaaactgctaagaaggctttgaactaataacaaaagaaataagctggggaaattttcctagcttatttttttatctatttttgaattaatgcccgtaatctgattttttcatctggcgtggtaaaggctgcgtcaaccgcgttgagataaagagtggtttcttcttcaggagttaaggcagttttttcttcaagtagctggtattcatgcggtaaattggtattggaaacggtcatatcgtcagaatttagcgtgactttcattcccgtgtgcaataattttttaatagggtaagaatcgatctgatcaaaagccttagtgttcatatttgaggtggcacaacattctaagataatttgatgatcaattaaatattgggtaagcgctggatcttcagtgcagcaaatgccgtgcccaattcgcttagcgcccatttctagtgcttggcgaattgaatcaggaccggaagcttctccagcgtggatagtgtaaggaacatccaagtcttgtgcacgttggaaaaacttttggtagttgatgttaggaataggtccttctgcacccgctaagtccagccctacaacgcctttccctaaaaattcttttgctaattcgacggtttccatattttcaatattattatgagcaaagcgcattagacatagaattaaaccagcatgtagttcagggtggtccttgtcctctttttgccgttgataaaatttcttaattccaccgatggcggatgcgattacttctttttgagttaaacctttttttgtgtgcagttgcggtgcaaagcgaatttctgcatacaccaagccttggctttttaattcagtcagcaagtcaaaaacaatggtttctaaatcatgcttggtctgcattaattgattaggaagggcgaacttttctaaaaattcttctaagctgctgcaagaattatcaacggacaattcttgatcatttaattgaggcatgccatgttcttgcattaatttttttacagttgcaaccggaacagagccatctaggtgaaggtgtaaatcgatgaattttctcatgttaatcctttctgttatctgatgattttgcttaaattgtttagtattgtaccacttttttaacagaagaaaacaaaaatttctaaagcaaacccatttttgatatgatataaggtgataaaaaatggaggaaattaacagttaaaagatagacaagatacaaagatctgttcagaaatataaaacatagaagcaggtcaaaaactaaaaatttaatattttgttcgcttgtatttatttcactctttgctaaatttatgtttgtattggaggtgaaacaaatgatcaaggctcaagtagtcgaattaaaacctaacaagaccatgcaacaagagctggataagctttgtgattatcgcagatattgctggaatcaagctttagccacttggcaagacatgtatgaagcacgaaccttagataaggataataatcccagtccaaatgagcgcagaatacgtgatgagctagtcgataataaggcagactggcagtttgctctgtctgctagatgcttgcaattagcagtcaaagatttggctaatgcttggaagaatttctttgataaggcacagcctgattgggggaaaccacatttcaaatcaaagaaggccccgcgacaaggctttaagactgaccgggctaaagtggttaatggtaagctacgcttagacaagcccagaggcattaaaacctggttcgatattccaacatatgaagctttaaaaatgaagcaaattaaagttgctagtgtctttagagaaagaggacattattatgccgctctttcttatgaagaagaaactttggtaaagcctagaacaggtagaaagacagctgttgatgttaatgtgggacatttcaactacactgggggcaaaatcaatgttttgccatcaagattgcaaaaactatacaagcgcattaagcattatcagagaatgctggctaagaaaagacgggctaatggcaagttagctggccaaagcaataattacgtgcaagtgagaaccaaactgcaacgtgattatcgtaaagtagccaacattcaaaacgatcttttgcaaaaattcactacaaaattggttaataattatgatcaaatagtgattgaagacctagccgttaaacaaatgatgatgacgcacgtcgcttcaaaaggcatgcagagatcattattcagtaagtttagacagatattgacttataaatgtgagtggtatggcaaagaattaatcttggctgataaaacatatccatcaacccaaagatgtgctaattgtggttatgttaaaaaaggtgatgaaaaaatcactttgcaaggcaaccaaaaacatcacactaagcacaatgagtatatttgttatgaatgcggttatactaatgatcgtgatgataatgcagtgttaaatcttttagctttagcaaaataatgaaaacggggctggctaagcccttaagctgcaagagttagtcaatgcgattactcctagattggaatattggaatactaatgatgacagcagtaaataaagcgaagaaaggaaggactatatttctttctgatatgtaaaaaaatatacattcttctacatatttctatgttttatatagcagtgttgatatgctttttagaccaaaatatacaattgatacgatttacaatctggacccccagaagttgaatgaaatggacattaaggcggttttttcagacctagataatacattgctcgcctggaataaatttgaaactgccaaagaaatggataattttaatcaaaagttagccaaggcgggaatcactctcgtggtcatttctaacaataatgctcaaagagtgggcaaggtacttgatccttaccatatcgaatttgtcgctaagtcacgtaagccattgccatttgcgatcaccaagaagcgcgaagcaatgcatttgcaaaaagatcaggttatgatggttggcgaccaactaatcactgacatgcaagcagggaatttggccggcgtgaagactgttctagttaagccattagttgaaactgataagtggaatacgagaatcaatcgtttctttgaaaaaattatctttttcttcctgggtttatcacatcgagtaacatttaagaaggagctatcaaatggatgaggatattatttgtatcggctgcggtgccaagctgcaatccgatgatcctgaaaaagcaggttatctgccaaaaagtgcactagataaggcaaagcaagaagaaaatgcggatgtttattgtcaacgttgcttcagattgcgccattataacgaaatcatgccagttgatttgaacaacgatgattttttagctttgcttaactctttaggacaaaagaaagctttaattgttaatgtagttgacttatttgatttttcaaattctttgctatcatcattgaagcgttttgttggaaataatgattttattttagttggtaataaatttgatctatttcctaaaaactctaagcaaagtaagattaaggattggatgagacaagaagctaaccgaatggggctttatcctaaggaaatcttcttggtttcagctaaaaagaagttgaacttggaagatttgatcgcttatattaataagcaatcgcaagacaaagatgtctattttgtagggacaactaatgttggtaagtcaactttaatcaatgccattattgacatgatgggtgatattcaagacctgatcaccgcttcacgctttcctggaactactttagacaaaattgaaattcctctagaaaatggtcactttttgattgatacgcccgggatcatgaccgagaatcaattggctacgcacttaaatgctaaggatttggagctggtctcacctaagaagcctttaaagccagctacttaccaattattgcctggtaatactttattcttagctggtttgggacggattgattatctcaagggcgaatcgactagctttactgtttacgttgctcgtggaatgtatattcaccgtactaagacagctaatgcggatgacttttataaaaagcataaaggtgaattgttatccccaccagctgcagatgatgaaatggcaccactaaagggtcaagaatttagaacggaatataagagtgaccttttatttggtggaattggttttgtgactgtacccaagggatgcgttgttaagacttacacaccagatgggattggtttaggtattcgtcgtgcattgatttagaggtttgcatatggttaatccaaaatgtattgaaaaaatgccaactgctaaagttgaagcagaattggaacaagaacaaggtaaaggtcgtcagattgggattatgggtggtacctttaatccggtgcatattgcgcacttggtagcggcagagcaagcaatgactaagttgaagctggatgaggtctggtttattccggataatattccaccgcataaaaatgctccgctgacttctgctaaagatcgggcaacgatgcttgatttagctacgcgcgataatcctaactttagggtaaaactattggaattgttccgaggcggcgtttcttatactgtggatactatgcgttatctcaaggaaaaagcacctcagaatgactattatttgattatgggcagtgatcaggttaacagtttccatacttggaaggaagctccgaccctggctaaactagtaacattggtcggaattcgtcgtccaggttatccacaagatccgcaatatcccatgatttgggttgacgcaccagatattcgcctaagttcgactgctattcgtcgcagtgtcgcaactggcacttcaattcgttacttggtaccagaagccgtcagagaatatattgaagaaaaggggctttaccttgacgaaactaatttttaaaaatacttattcaccattctctagtgaacaaattgttgctaaagaaaaggcaaacatgaagaaaaaacgttttgaacattgtgttcgtgttagtgaaactgcacgtaagttggctaagttaaatggatatgatgaagaaaaagcagccttagctggctttgttcatgattatgccaagcaggtaccggtagaagagtatcgtaaggtaattaaggaacaggattttgatccagatttgcttaattggaatcgggccatctggcatggcattgtggggattttctttattgaacgtgatttaaaaattagggatcctgagattttaactgccgtacgtcgtcatacgactggtgatactaagatgactacattagataaaattatctttgtagctgattttattgaacccggacgagattttccaggagttgaagaagcgcgcaaagttgcttatgctagtcttgatgaaggggtaggctatgaattgcagcacaccttagagtttttaattgaaaataaaaataaagtatatcctcgtactttagaagcatacaatgtatggggaattaagtaataaaaaggagaaaaatattgactagtcaagaaattttagattttactacccaagcaattagtgaccgtcatggtgaagatactgaagcttacgatatgcgtggaatcagtattttagctgattactatgtcattaccagtgcaggctctaatcgtcaattacatgcgatcgttaactcaattgttgatgcggctcacgaaaacaactacactgactaccgtattgaaggtaccagagattctaactggcttttgctcgatttaggtgatgttgtagtcaacgtctttactaaggaagcacgtgaactttataacttggaaaagctatgggctaacggtaagcaagttgaattgaaggaagattaagcaatgagtgttgttgggattattgcggaatttaatcctttccatagtggacatgagttcttgctaaatcaagcacgcttggttgctggtaatgatccaattgtggtgctcatgtctggtaactacgtgcaacgtggtgagatggcgattatgagcaagtgggagcgggctaaggtggctttgcaatctggtgccgatttggtatttgaaacaccattttcaacggcagtagaaccagctgatctttttgctctcggaaacattgaacaacttgctaaattaggcgtaactgatttagtctttggtgtagaagatgctaacctgaattttgcttatttgggtaaaagaattgcggaaattccccagaatcacatggattttagagattatagccaaacttattcaacacaatacaaccaaatggtagcgcatgaagtaggctatgaagttaatcagccaaatgctattttggggttagcgtattcagtagctaatcataatttaggttcaccattaaatctgcatccggtcaaccgaattggagcaggacatgatgaccttttacaaagagaaaaagttgtccaaagtgctagtgcgattcgaaatttattattgcatggtgaagatacaaaaaatttaaagtattggatgcctaaagcagaagcaatggtgttagctgagcagaaaatttatcctaattggaatttgctatatccatttttgaagtatcgaattgaatcatcttcagttgaagaattgcgtcatatttatcaaatgagcgaagggcttgaatataagatgaaacaagagattcatttagcccgcgattttacagaatttttgcggcatatcaagtccaagcgttatacttattcccgtttgcgccgtttgagcttatatactttgcttaatgtcactcaggatgatatattggctagctttaatcatgagtctttgatgctcttaggctttagtaaggtaggtcgcaaatatttaaagcaacagcgcaaggaatttcagacagaaatcgtctctaaagttgataaaagaagtgctaagaacggctctttagctttacaagttagggtagaccgtttatttgaacaaataatgggcgttgatcaaaactttggtcgacggccaatcgaggtgtaaaaatgttagaacttagtttttctaggattcaaaattccaaggaaccattaactcacattgaacgtgatttggaaatgcgtccagaattttttaagcgtagtaaagatctactaattgatgcgaaaaatgtaaaagtgagcggtgacttgttctatcaagaaccatttgtgactggcagttttcatgtggccgctgatctggttgtgccatcaagcagaagccttaagccggtaaactatcatgaagattttacttttactgaaaactaccttgatcgtaagccaaccaaggaagaattggaagaaaacgatactattgtacaagttgagaatgaccaaattgacttgcaaacagcggtagaagataatattttactccatattccaactactattttgactcctgaagaaaaagaaaagaatattttcccagagggtcaaggttgggaagttgtttctgaaacctcttttgaagaaggcaagaagaaccaagttaacccagcttttgctaaattgaaggtcttgcttgatgggcaagataatgataaggacaataaaaataagtaataaatgtaattgaaaaatatggtggacaatcaaagaaaatttttactttgattgttttttaatcttgtgttagaagcacttttaaagtatcctttaattataaaagcattttttaattaatttattagtattagaaaaccaaattgatctacgaggaaatgaattaacatggcaaaaattctaattattgaagatgaaaagaacttatctcgctttgtcgagcttgaattgcaacatgaaaattacgagactgttgttgagaataatggtcgtaagggattagaagatgcattgagtcaagactttgatgctatcttgcttgacttgatgttacctgatttaaatgggttggaaattgcacgtcgtgttcgtcaagttaagactacgccaattatcatgatgactgcacgtgattcagtgatcgaccgtgtttctggtttggatcatggcgctgacgattatattgttaagccttttgcaattgaagaacttttagctcgtcttcgcgcagtgttacgtcgcgttaaaatcgaaaaggacgcatcaaaggttactgttgctaagcaaaagattgtaaaatttaaagatttgacaattgaaactgctaaccgaattgtgcaccgtggtgatggcaaggcaatcgatttaactaaacgcgaatacaacttattaatgaccttgattgaaaataagaacaacgtagttagtcgtgatcaattattaaacaagatctggggtccagaatctaatatcgaaactaacgtagttgaagtttatgtacgttatttacgtaataagattgacgctccaggtcaaccatcttacattaagacggttcgtggtaccggttatatggtaagagatgaagatgatgatcaagaataaagacgaggaaaaagaggccaagcactcatccctaattgtgcgatgggttagtatcgttgcattaacgattacggtctcttttgtcatattttcagttgttgcctatcaaattgttagtcatcaatcgatggaacagcaacaagagacatctaataatgtagttaccacgatggaccggacattaagttctattcaagatgagctagagatctcaaatgtaattcctgctctgtcaccgtctaccaggcgtattttgaggggcggtcctgctattagcaaaaaagatacagagaataaagcatttagtgatagcctgatttcatcgatttcgaatccagatattaatgtagcagtttacaacaaacatgatgaaattgtttttactaatggtaattctgcacctaagctaaaagaatttgccggcaaccaacttgaagaagtagtaaaccgaaaaaaaggcaaaatgcttttaacctaccagaaaatctattctgaggtaaatggcaaattaactggctatgtagtggtttctaatagtatgacttattacaatagcttgatgagtaatttgcttcattggatggtaattatttcactgattgcaataattatcttcattgcaatttcttatattttggttgttaatgtagttcggccaattaagacgatgtctaaggtggctaaggaagttaatgctgatcctaatagtgaggctagaattaaggaactacatcgagatgatgagttagaagaattagctacttcgattaatcaaatgctagaccggatgcaaggttacattgagcaacaaaagcaatttgttggtgatgtctcacatgaattaaggacaccagtggcagtaattgaagggcatttgaacctgcttgaaagatggggcaaggatgatccgcagattttggatgaatcaattaaggcttcgttgcaagaagctgatcggatgaaacatttaattcaggaaatgcttgatttaactcgagccgagcaaatcgatgttcaatatccgtatgaagtaagtgatgttaatgaaatcatccgcagagtggtcgctgatatggcaatggttcatcctgacttcaagattcagctggatgaggatgatttacctgatgatacagagattcaaatgtatcacggtcatttggaacagttgctagtaattttgatcgataatgggattaaatattcgactgatcgcaagcagattaatgtttcagctggtgtaactaagaagaatgttaatattattgtgcaagactttggtgaggggatttctgaagaagatcaaaagaaaatcttcaatcgcttctatcgtgtggataaggctagaacccgtgaaaaaggtggcaatggtttaggtctatcgattgcacaaaaattagttgctagttataacggaacaattagtgttgaatctgttgagggtcagggcagccagtttaaattgaagttccctcggttgactaagaaaaaagccgctaagttaagaaaattaaatgagaagaaacaaatgcctaagagcaatcttgaggcataaacaaaatcctattaaatcaaggtttgggtaccaagatttaataggactttttttctctagaggcttaggtattagaaaataagaaataaaatgcttcgaaaataattataatttttattaatttaagcgatataattagctaaaaatatttaaagttaagggatgtgacataatgaaagaacgcattttttcaaggaaattttggcagaaagtttttaactatcaattgattatctggtttctcttgatgattagttatactttttctcagcggaacaatcatttttattttataggggatttgttcaatctagcttttagtacggcgatcatgggattgaacttttacgtgcaatttaaaaaggattccagcaagactaatactcaaattgttcgctggctgaccatagtaatttttgctaaatttggcatatcactgggaatttcttgctaaaaaacctgccggctatcgagattctattagtattactgctatgggcggtttatattttcttgctagttccaattgcagttgtacatgttggaccgattaaaaattggtttttacgcttgctaactatttactttcttgatattcagtacggtgatgcacaaaatttagcaataaatccagatttttgctggcttcattcacttacttatcaaggtgtaatcgcagctattgctttattaacgatgacttgtttcttagttaaagcttggggctatcacttcaatccaaacttaaaatttattaaaagttcaagctttcagaagaagatcttgctggctttattgatcatggcaaccattgatttgttttacaatattcctaatttaactgcagccattgagcccggaattttggaagaaaccgaacgctatttattgatcgtaatttttttagctggttttaatagattcccaaagtatcgcatccctgttgcaatctatggttcagcaattttgttcggccttagtcatttaagtaattttggctggcatggagaaagttttactgcaacaattgcacaagttattggcgtaatggggagcgcctttatctgggcagaattgtatctctatacaggaaaactatggttgccgatgatctatcactttttaatggattatatttctgatttgcaatctggttggaattctgctggctggtcttggaatggcgaaatcactgattatatttatactgtattaattgttggcgttccattgctattctcaatttggatgcttttcggtaaaagaaggcaagtaatggaagataatgcagatttgattttggatctaaacggtaggcaaagcatgatttagcagtgacttatattaaagggactataatgtatatgcaagggtaaaataattaagagaggtcataaattatgaaacttaagagaattgtattaagtattgtggctggaactgcgcttttggttcctgcagctttagcgggtcaaaatcaattaacaccggtagttcgggcaagtactctgaagaataagattacaactgttaagagctataccaatccaactttgtataataagaatggtaaagagctaggtagccaagatcggataaattttaagaaaccgatcagtttttatgggcaacctattgttattcagggacccagggtcaatgcttttattaatcttaatgggatgccacaagctattgttaatggtgaaacctatgcagatttaggtgatggtggttatgtcaacatgaaatcggttggtagctataactggaataataatgagatcggaattattaaaaacacctatatttacaatagcaagggtaatcgtttatcaacttatcgcggtggcaaggcttatttaactaaaggtagcaagattaaatatgctggtaaaagttggactacttatcctgattcatattttaatttaggtgatgggacgtatttaaagtctaataacgttaataccatgaatggcaaaggcgttttgaagctgaatgctaacactactatttataataagaatggcaagcgtattagctttaatggacaacaggtttttcctaaatactcaattataaattatgctggtaagcgtcgcactaagacacaaactgacgattactattacacaaactgacgattactattacacaaacttaagtggtagtaaatcatatgcaattaagaattataagattaaaggtcaagactattattacattggcagaggtgcttatatcaaggcaatgaatgttggtcgcatcaatggcaatccggtatttcgtgatggcggtgcaactacgattgttccgcagacagatttgtacatctataattctaaattaaagaaaaccaaacaatctgttaagaaaggacaaaagattagagctttagatccagttgttcttggtagtggtgatattgcccaactattttacagaattaagggaacatctaactatgtttcctggggtgattatagtgagtatggttttgaagatgatgagcacgtgggctacttcaactttcgtgttagattaaatcctgttaaaactattgaaaatgccgctacacgggccgctgaagaatcagattaattgggagtgaagacgttatccatttggatagcgtttttattggattatgaaaaagaattaatctgaagtgtctaggaaaactctaaaaattgaaaactcctactaaatcttggcataataagccttgatatagtaggagttttgttttgagttaaagccaaaaatcgattaaaaatagctttttctcagatacaaacttaattttttctatagagatctttcttcaaacaaatgaccataggaacttaaaattctagctaaatccgtccaagtaagactgatagttttggtattatcattgggatggacgccaacataattattttcctccatggccgcttggtctacaatcaagggaatagtgttgctagaatcattgagtaagttaaagggtgaaaccgtaccagatttaaccttgagtttttcctcaagttcatcttctgaagcaaaagttagactaggagaaagtaattcactttgtgcttttttccagtcaacttttttattctcaggcaacatgagtaaataataattttttccgttacgcgatttaataaaaagagtcttacatttagtaaaatcttcatttttcaagtatttatctgcttctttagttgtataaactgctggatgagaaaaaacttggtaactaatatcgtgatcatctaaaagttgtaatatttcttgagtatgcatattttcctcctaataaaaaagtcaggattttactcctgactgataactatttacgcttttgcttacctttattacggttacgtaagtcttggtgtagttctttcttagcttcagttgtagccttgctttgaccgctattggagttaaacaaagcatccactttttctttagtaacaacagtttcaattggcttatcttttaattcatcggcaatatgcttcttaacactaggtgtaaggacaaaggtaacgattacttgttggacaatcattactaagttaccagcagcccagtaaagagctaaggcaccagagaaggataaactgaagaacaaagtcataattgggttaacaatcatcattgattgcatggtcttcttttgttcttctggaataccaattagtgagatataaccttgaataacggtaaagacagtcgcaataatggctaaaacaacagatttggaacttagagaaataccaaagaatttggattgtgccaattgaggtgaatagaataccgcttgataaattccccacataattggtaactgaataattaatggcaagcagcccattccaccagttaatgaaacttggtttttagagtaaagctctctttgccaagttgataaagtcatttgttggtcaggggtgatccccttgtgtctcattgcattttgaatcaacttcatttgcggttgcagacgagccattttttcctgttgacgtacactcttgttttgctgtactaacatcaatggcatcaagattacacgtacaactaccgtaataatcacgattccccaaccagcaccattatcgccgccaatcatgtgcgcggtttgaatcatgatattttgtaaaggtcggcctaaccattggtaaacccaaccgtaaataccgctgtgcggtgcaacatgtggatcagttgttgccccacaggcacttaatacaagagtagctactgctaataaagccagtactccagcgtatcttttaatttttttcatttaaataaatcaccacttaatttctatctaaaaatgtatgtctctaatataatacatgaaaatcatgcattttttctacacctggaaccgattcttgactaatattttgaatttgggcaaatccagatgcagtaggtagtttttcaataaagcggtcgattttatcactgtctgcttgtaaatagattgtaacggtaccatctgcattatttttaacagtgccaggaatacccatcttgttagctaatgccatggttgaccaacgaaagccaacgccttgaactaagcctgaacaaattaattttcttgtttccatttttatctcccttatttaaattaagttcaactttgattttagcatgatcaaaatagattatcagttataatagattttgaatacaaaaaggagaaaaatatgcaacaaattagttcagttaataatgcaacgattaagaaattagcgaagttaaagcaaaagaaataccgcgatgatgaaggcttatatttaattgaaggctttcacttatttgaagaagcacttaaagctggtaaaaaatatcagtatatcttaggtactgaagaagcacttgatcaagcagatagtgaatatgaagttaatttaagtgggaagaatgtcgtattaattaacaaagcgattgctcgccacttaagttcgactaagaattctcaagaaatttttatggtattaaaaattgatcaaccaaaagaatttccgtttaattatggcaagtgggtgctgcttgataacttggctgatcctggtaatgtggggacgattatcagaactgctgatgctgctggttttgatggggtagttctttcaccagagagcgctgacctgtataatcctaaaacgcaacgtgccatgcaaggaagtcaattccatatcgatttgattaagcgtgatctagctgatgtgatcaccgattttcaggatgcagctattccggtttatgcatcgctgcttgatcgttctgctaagcaattgcctgatttcgaaaaagtgccacaacttgccttaattattgggaacgaggcgcatggcataagcaaaacaattgcttctttagctgatgaaaagctttatattccaattaaaggacaagctgaatcgcttaatgccgctgttgcagcagggatcatgatctatcactttgcttagcacttgtaattagtaagtagatctactataataattttagtaatactaaaaagtattttatataatagtatttttactggaattatataatacggagggacttacctatgcaagaagttaaagagaaaaaaggacgcagctccttgtaaaccagaagattatgaattatgtggtcattttgttagtgcgtttaagattattggcaaaaaatggaatggcttaatcatcagttctttgtgtgatacacaagatatgcgctttaaggacttggcacgaactgtcgaggcttgcagcgaccgtgtcttagttgaacgtttgaaggaacttgaaaaggacgatattgttaaaagaagcgtcgatcaaagtaccggtattatttcatatggtttgactgaaaaaggtgcggaacttaagcctgtttttgatcaagtacataattgggcagataaatgggcttaagctattgacattaagtaagcatagaagtatattacttattgtaagttgcttatttaaaataagattaggtgaaaggagtacgaaaatgaaatctttaagtatgatgaatgttaatactgactgttgttcttgtgtatctaacattatttttaatactcaagaactcagttttcgtatttccgaatagctttaatccagagatcaaaaagatttacgttagctgaaaagacgtagatcttttttatattgtttaaagagacctatgggagtaggtctttttttgtatgattgggggatttttaatgaattggacagttatccagcaagctctaccaatatttgcgcgcggctttgaactgaccttatggctttcattgattggcattgttggctcaattatcgtgggcattattgtcagcttagtacaatattttaaactaccagtactaagtcaaatttcaacggcatatgtcgagctagctagaaatacaccgcttttgattcaacttttctttttgtattatgcttttccagtaattggcttaaaaatgtcggcagaagtctgcggcattatcggtttgattttcttaggcggcgcatatatggctgaaggctttactggtggctttaatggtgtgaatcctagtcaaattagtagcggtaaggccttgggaatgaataattttcaactagctcgttatgtggtttttccacaaggattcagcttaagtatgccagcattaacggctaatattattttcttaattaaggaaacctcaatcttttcagtaattgcaataccagaattgactaacactgctcttgacttaattggaatgtactatcggtcaaatgaatacttactgatgttagtagttgcatatgcaattattttgattccggtgattttattattaacttggcttgaaaggagagtacggtatgcttcattcggggattaatgttttatttgaagggagtaactttgctcgcttgatggcaggactatggacttcaatttggattgcggctttgtcattaattatcggcttagctgtgggtacaatttttggtatcttaagaacgctcaaaaatcgaccgattcgctttgttttgcgcctatacctggaattctttaggatcgtgccaactgtagttttactttacttagtttattacatcttgcctagaagtttgcacgttaactggccagcaacttggatggcagtcttagccttttcaatgtgggtagccgctgaatttagcgatatcgttcgtggagcactagaatcagttcctaagacgcagcgtgaatccggcttagcgttggggctaaatcgcttgcagctatttcgctatgtattattgactcaagcggtcaaattagaattgccagcaacgatcaatttggctactagagtaattaagaccacttctttgttaatgattatcaacattatggaagtgatcaatgttggtcaacaaattatcgaagctaataaccaacaatatccagcaggcgttttctgggtatatggttttatctttatcttgtactttattttagattatccattatctgcatgggcaaagcgtttaaccgctaaaaattaggtgaatgaaatgacagaagaagttttaagagtagaacatttaaataaattttatggtaaacatcagaccttgtttgatattaattttagtttgaacaaaggtgaagtattgacgttattaggaccatctggttcaggtaagagtaccttgcttagaaccttaaatggcctagaagaatatgaagacggcgcgatttatttccatggcaaaaagattaatcctagtccaaaggaatggcaattattgcggcagaagattggcatggtttttcagagttatgatctgttcccaaatttgaccgtaatggaaaatattttgctggcaccggtgaaagtgcaaaagcgtgatgaagacgaggttaaagaagaagcagtcaaattactaaaacaagttggcttgtcggaatatggggatgcgtatccgcgtgaattatctggtgggcaaaagcaaagagtagcgattgtacgagctttagttatgcatcccgaagtaatgctttttgatgaaattaccgcttcacttgaccctgaaatggtgcgtggcgtgttagatattatgcaaagattatctgatgatgagcatatgacgatgatcattgtaacgcacgagatgaactttgctgctagaattgcagataaagtattgtttttagaggatggaaaaatcttagaggatacaccaggcaaggaattctttgccaaaccgaaaacgaagcgagcacaagaattcttagaaagtatggatttttaggtgtgaacaatggcaaaaaagatttttaactggattatggctatcctattcgtagtagtagtcttggttgcaggctatattggcattagccggccaggcatcaatggcactgcttcaggggatagatggaatagtgaaaataatgtttcttcaattaaaaggcgtggttatttaagaattgccgtttttggtgatttgccgccatatggctgggttaattcacaaggtaagcgtgttggttatgacgtgcgtctagcgcgcagagtagctaaggatttgggtgttaaacccaagtttattcaggtaaatgccaataaccgaattgataccttgaattcaaataaggcggatattgttctagctaacttcaccttaacgcctgaacgtaaaagtgtggctagttggaccaaaccatacatgaaggtatcagtcggggtaatttcaccaaagtcagctcctgtaactaatgctaagcagctaaagggcaagagtgtaattgtgactaaaggtacgacagcggaaaattactttactaagcaaaaaggcgttaacttgctgaagtttgattccaagacccagcagtttaacgcaattaaaaacggccgtggcgcagctttagccgatgataattcttatttgtatgcttgggttaagcgtaatcctaagtttactgttggaattaaaactattggccctaaccaatacatctctggtgcggtgaagaagggcaacaagtcactgcaaaaatggatggatcgtgaaattactaagctgaaccgtgagagcttctttacttatgattataataaagaattgaagccatactttggtaaggaaatcagacctagtgacattgttttgccgcagggaaaataaaaaacttgcaagaaacaagtaaaagaaatatgataatagttaattactaagatcaagactagtaacagattatttttctaaagagagtcttctttcaaaagctgcaagagaagatagaaaaagtctgtgaatttcatcttgggagtaggatctaatcaattccggtatttcaccgttaacgaaaacttaagtgtgggcgttgctacgtccaaactagggtggtaccgcgacgcttcgtccctattggagacggggctttttttgttttgaaaggaaagatttaatggacttatttgataagttaaaagagctccatgaagaagggcttaagcaaatcaacaaggctaaagacgaaaaaactttgaatgatgtcagagttgaacttgttggtcgtaagggcgaattaactaagattttgcactcaatgcgtgaagttgcgccagaaaatagacgtgaagttggtcaaaaggttaacgaattacgtgacttgtttaatgctcaattagatgaagctaaagaaaacattgttcatgcaatgttagttaagaagcttgaagatgaaaagattgatgttactttaccaggtcgtgaagcacatcttggttcaaagcacccaatcaacattattttagatgatcttgaaagctactttattggtatgggctatcaagtagttcaaggtccagaaattgaaactgatcactactgctttgaaatgatgaatatccctaaggatcacccagctcgtgacatgcaagctactttctacattgatgatgaagatttgcttagaagtcagacctcaggtgatcaagctagagtcctagaaaagcacgacttctcaaagggtccacttaagatggtgggaccaggtaaggtataccgccgtgatgacgatgatgcgactcactcacaccaattcatgcaaatggaaggcttggttattgacaagaacgtaactatgagtgatttaaagggtactttggaattaattgccaagcacgtttttggccaagatcgcgaaacccgtcttcgtccaagttacttcccattcactgaaccatcagttgaaatggatgtatcttgctttaactgtaatggtaaaggctgccctatttgtaaatacactggctggattgaagtattaggtgctggtatggttcaccctaatgttttggaaaatgcaggtgttgactcaagcgtttacggcggttttgccttcggtgttggtcttgatcgtttcgctattttgaaatacggtatcgatgatattcgtgacttctacaccaatgacgtacgtttcttagaacaattccgtaaggaggaaagataattaatgttagtttcatacaattggctaaaagattttcttgatttagatggtcaagatccatacgaattagcagaagaaattactcgtagcggggttgaaattccagaccgtgttcatccaatggatggcttgaagaagttagttgtcggccgtgtccttgattgtgaaggcgttgaaggtactcacttgcacttaactcacgttgatgttggtgaagacgaacctttgcaaattgtctgtggtgcacctaatgtagctgcaggtgaagatgtgattgttgctcttcatggcgctcgtattgctggcaatgaaaagatcaagaagggtaaaatccgtggcatggaaagttacggcatgatctgtggtttacaagaaatcggctttagcgatagcgtggtaccacaagaatttgtcgatggtatttacgtattcccagcagatgccgaagttaaacctggtcaagatgtatatgaagcacttggcatggatgattacattttgaacttcgacattactcctaaccgtgctgatactttaggcatggaaggtgccgcttatgaagtcggtgctattatcaaccaaaagccaaaggttgaagaaaaggttgtcttaaaagaagatggtccagcctggacagattcactcgatgttaaagttgatgaaaagcttgcacctaagttttacttacgtaagctcgagaatgttaagattcaagactcaccactttggttgcaacgtcgtctttggaatgcaggcattcgtccaattaacaatgtagttgacgttactaactatatcatgctgttaactggtcaaccaatgcatgcttatgacgctaagacttttgctaacggaaagtttgaagtaagacttgctaataagggtgagaagcttactttgcttaatgaaaaagaagttgaccttgaccctaaagatatcatcattaccgatggtaaaaagccagtaatgatggctggcgtcatgggtggacttgattcagaaatcacttcagaaactaccgatgtcattcttgaatcagccatctttgatccaactttagtcagaaaggcagcacttcgtcacgctaaccggaccgaagcttcaagtcgctatgaaaaaggcgttaactgggatgccactgaaaaggcaattaacatggctgcgcttttacttagaaatgacgctgacgctactgttgatgaaggtattcttaaggcaactgaccaaaagcgtgaaccagttgtggttaaaactactgcttcatacctcaataaagtattgggcactaagttatcagttgatgaaattgtaaagatttttgaccgtctttgctttaaggtagatgttgatggtgataatttagctgtccatgtaccaaatagaagatgggatatttcaatcccagccgacttagttgaagaagtaggccggctttatggctatgacaaccttgaatctactcaacctgttttgccagaaactcatggtggctactcagaaaaagaagaaatgatgcgccgcatgaaggcaattgttgaaggacaaggcttgatggaagctatttcttattcattgacttcacctgaaaaggccgttcgttacactaaggatccaaaagaattagttgaagttaaatcaccacttaactcaagccgttctgcaatgcgtgagaatttgatgactggattggtagatgctgctagttacaactttgctagaaagcaaacacaattagctttatttgaacaaggcagaacttatgaccatgatggtggtaaattcaacgagcatgaacatttagcagctatttactctggcaatacttttgcggaaaattggcaacatttaacccaaaaggtagacttctactttgttaagggacagttaaccaatttgttcaatgcaattggtattgatcctgaaaaagtggtttatgaggctaaaggcatcaaggggatgcacccaactagaactgcaggaatctacattgataagcaatatgttgggatgatcggaatgattgctcacgctgtaacgattgctgataaggcacttcgtggtagcgagctttatggctacgaaattgatctcgatacaattattccaatgttaactaagggcgtaactgcagtgcctgcacctaagttcccagcaattcaacgtgacctttcacttttagttgataagccagttactaaccaagaaattgaaaacgtcattaaatctaatgctggtaagtacttaactgaacttaaggtaatcgatgtttatgctggtgctcacattgatgttggtaagaagagtattgcttacaacttaaccttcttgaacagaaaagatactttaaccgacgatgttgtcaataacgcgatggataagattgttgctgctcttgaaaatgatcttgcgattaaagttcgttaaaggttgacattattgacgtaaattaatattattgatcagtgcaagataaagaaaattaatttctgaggagttaaaaatatgcctgaaaaatcttatccaatgactgctgaaggtaaagaaaaacttcaagcagaattaaagaacttaaaattagttaagcgtccagaagttattgaacgtatcaaggttgcacgttctttcggtgacttgtcagaaaactccgaatacgatgcagctaaggatgaacaaagtcaccttgaggatagaattgctcaagttgaagaaatgcttaagtatgcacaagttgttgatgcagaaagcgttgatcctaacgaagtttcagttggtaaaacaattacctatactgaagttggtactgatgatccagaaacttacactattgtaggtagtgatgaatcagatccattgaatggcaagatttctaacgattcaccaattgctcaagctttattgggcaaaaagaagggtgaaaccgtatcaattaccactcctggtggcaagtttgacgttgtaattaacgaagttaaagcctaataataaaaagggagggtagctatgactatcttcctttttgtttttttgaaaggattttaaaatgagaacagttggtattattggcatgggccatgttggtgcaaccgttgcctatactttatttacgcacagtatggttgacgaactgattttaattgataaaaatgaagctaaagtaaatgctgaatacaatgacttgcatgatactttggctagaaatgatagctatgttaatgtgcgaaagcaagattgggacggcttagaagatgctgacattattattaccgcttttggtgatattgcggcttcagttaagacaggcgaccgctttggtgagtttgaattaaatgcaagaaatgccaaagaagttggtgcagatattaaagaatcaggctttcacggcgttttgatcaatatttctaatccatgtgatgcaattacccaaattttgcaagaaacttctggtttaacgaagaatcgcgtctttggtactggtactttccttgatactgcaagagttcaaagaataattggtgaaaaacttggtcaagatccacataacgtagaaggtttcgttttaggtgaacatggttcttcacaatttacagcctggtcaacggtaagagttaataacaagattgctttccaattgtttggtgatgaagaacaagaaaagattagtgaacaatcaaataagaattcctttattgtggctaagggaaagggctatactagctatgctattgccacttgtgctactcgtttagttcaagcagtctttagcgatgctcatctatattgtcctgtttcagtttataatcctgaatacaagacttatattggttatccagctattattggtcgcgacggcattgaggaagaaattgaattaaagcttacttctgaagaaaaagaaaagttgcaagctgctgcagataagatcaaagaacacttgaagcaattgaagaaataagtaatattcattataaaaaataagacaggaattacatctgctgcaattcttgtcttatttttgtctactttagctttacgtcccaagctgcaatttgcttattgccatagtagcgtttataaatttttttagtcttcttaatttgatacgccttaacaacttcttgataaattttcttatttttgtcttttgtccgggcacaaatgatattgatccattgttcagaatccttatttaaaggttctacaaaaatagtctgcttatcacctaaatgagcgggaccagcaaagtcattgttaacaaccgctgcatcaacgtcatcaatgacacggctagtttgttctgatgcaacttctttaatcttgaaatggtcaggattagaggtaatatctgctactgatacaagtactttgcctttcttcaatttgattaaacctgcattttttaaaacaaacagagctcttgattcattagtaggatcgctaggaactacgatagttgctccatcgggtaatgcattaaggctatgatatttcttagaatataggcgaataggagcaatgtaggtcttaccaattgcagtgattccaccatgatttgctttattccaagcattaagaaaagcatagtgttgaaaggcattcagatcaacatcaccagatttgagggctttatcaggttgatcataaccgtcaaaacttttagtggttaaaataatgccatatttttctttaacggttttggcaacgctcttccagatagcaatatcgcctttgctggcaccaacaattccgacactaactttagtttgactactgcttttgggtgtccaaaagaaactaaaatagccagctacaataattaataagccaatgacggtgctaataataatgtgacgtcttcttctttttctcatttttatccctgccttttgaaaaaataaaaaacacccatcctgaaaaggacgagtgcttcgtgttaccacctttaattcgccaattatttgcataaccagccttcacaactatctaacaatagcttgcattgctaacgagtgcaaccccgatgctagctaaatgtcactagcataatcattctgaatccatcttcattgaatcattctttttgcttttcaccaaccagcaattctctgttaaagatttggttcaattactctattcatcaagatttttaattattgttaataatttatcatttaattttaattgtgttaaataaatttttttacttagttaaaaagttagtaacggaagaaatagtgagaaaaagtttatttttgtcgattaacaaagtagtaaatgagtgagacaaccgattcagccaacatcccaccggccatccagtacattgccatcatcattttgccggtaaaagtaaagtaggcagtaatggcgtaaacaattacccaaataattttccaaaataagttattcattcctgagcacattttgaagctcctttatttttgactagcaccagaactgctgtcaacttccatgccgcaaccttcggtatccattcctggcatccacacatcttcaggtttaatgcctctttctttagcaaaggcgtcggttaatgtcttcatatccattaacttgtatgtctttgggtgtttagggtcgaatacttcgatttgagccatcattccggcatcttcgtgttcaataatgtggcagtggtacatgaagactccagtttgtgggaattctacacgcaagcggacggtttcacctggtctgacaggaatggtgtctttgtaaccatattcatttggaaatggcttttcgccatcacgtgaaacgactgtaaagtgtgtgccgtgaatatggaatgggtgcaacataccgtgttccttagagttggtattagttacgtcccagtattcagcatgactaacttgttgcttcatatcgatccgctgcattgcgaattgcttgccgtttatcttgttgtgatcatccatagttactttacgaactggcaaatcttcagcgatttcaggaatttctggtttgaataatgtatcaggaataacactgttgtcaggtgcaaacttgtgaattctaaattcaattagtttgaaatcatcagtataaaggttaacgacatcgccatcatggtaatccttgaagtcaactacaacttgaagccgttcaccaggtgttaccaagatcttagtcattttgattggatgaggcaaaaatgaatcgtcacctgcaatttgagtcataactaggtcatcatcaaagtgcaagcgccattcacgacggttagacccacctaagaatagtaaacgaatcttttgtgttgttacatcaacataagggcgaaccgtgccgttgattaatggtgtttcaccgaagacgcccattgcatcataatcagcgcgatagtcaagttgattatctttgtggaaagtacggtcttgcaaaataactggaaactcgtcaacgccatagtttttaggaattgggagtttagcttcgttttcatctgttactactacgcccatagctaatcccatccaaacttgggcagcggtggatggacatgggtgagcatgaagccatgttaaggcagctggttgattaacagtgaattcgatttgcttttcttcacctggataaacaggggcatgacagccaccatcagtaataggaccaggaacttccatgccatgccagtgataagttgttagttctggtaaactgttttttaaggtaacgtgaactcgctggccacgttttaagaccatggttttacctaacaaaggagcgttataaccccaagtcttggtcttagctccaggcaatatttggctttcgctttcaattgattcaagaatgaaccagacatcagtatcagtttccttatccggtgcaaggactggagggacagctaatggctgagcttctacaccttgagggatgcttaatttcttgtagtggaagtggtttttgtcaaaatcttcatcttcgataaagtaattagtgtatatcttatctgtcatcttattaacaccatccttttgacactaacttagcatgattttttaccgttttcaaggcgcaagaacgctgttatttaaaggcttgcatgtctattataactatgtaatgaaaaatatttttactattttgtaatcgcttacacttaggtgaattatgttattttacaagatttgttgccttgctaggcttgcgtgtctccggtaaactaagcatgaagaggtgactagatgtataaaattattgcgtgtgacttagatgaaacgttgttgagcgcagatacgcatgtctcagtagaaaatagagaagcgattcaaaaagcagttgctcacggtgtaaaatttgttcctgcaactggacgaggctacgtttctgtccaaaatactttaaaggaaataggattagagcaggcagctaatgaatatgtgatttcattcaatggtgccagcattacagaaaataagaataatcgcgtgctgtattttgacggcttgcctaatgaaattgcggatcggttatatcggcatggggttgaactagatattgccatgcatgtttacactcaagatatggtatatacgtatcatatcgatgatgatgaacgtgcctatatgacgggacgacaccagtttaaagagattgaagataaagacttgtcatttttggaggggcagaaaattgccaaggtgctctatgagagtcttgataataattatttgcaccggatcgccgctgaattaggaccaattacgcaagaattggatatttcatattcatctaatcgttatttagaatttaaccgtaaaggtgtcaataaaggcgcgggactgatgaagctggctgagcagcttagggtgccgattgaagaaacaattgccattggtgataattttaatgacttgtcaatgattcaggctgctggtgtgggtgttggtgtggctaatgtcaatcctgctatgaaagagcaatgcgattacattactcaggctgataataatcatggtgcagttgccgaggcaattgatcattttatttttaacaattgaaaaaaataaaaaaataattgacagattaaaaatacatgatattattgtttacaacaaataaaaaaatgagctttgataaggaaagtaacttaagaaatgatttgcagagagtcttcggttggtggaagaagataatgatgaattaagtgaaaatcacctttgagctgaaagtgcgatattagcattttcagggtccgccctctatagcggcgacgtatcgctgattttgatagaatcagccgcacgtgcatgaggtagaatttttgtgagtattattctacgaataaataggtggtaccgcgttgaagacgccctattagatcaattgatctagtagggcgtttttttattatcataagcttgttgttaattttttgacttatgggagagataaaaatgagaaaaacattgaagcacttatttggcacgactgtagtagcacttttaggcgtaagtactttatctgcatgttcatcaagccaatctggtgctaaagcacctaaacaagaattgacctggatgactacctcagaaatccaaactatggatccttcaaagatggtagatacaactggtagtgaacaggcatctaatgtttttgaagggctcaatagactgaataaagcgggtaaagttgtatctggtgtggctactaaaactaatcagagtaaagatggtttgacctggacttttactttaagaaagaatgctaagtggtctaatggtgatccagtgaccgctgaagattttgtttattctttaagacggacacttgatcctaagacacaatcacaacagcaaaatgagtggtcaaatgtagttaatgcagatgatgttttagctgggaaaaaagctccgtcgactttaggtgttgaagctaagggtaaatatgaattggtagttcacttgaaacatcccgtaccgtattttaaagccttgtcagttggttggaatccgcaaaataaacacgtagtcgaaaagtttggcaaaaaatatgggactgcatctaagtatatggtttacaatggtccgtttgttcaaaaaggctggactggttcaagtcttaactggaagttagaaaagaatgatcaatattgggacaaagataaagttaaattgcagacggttaattatagtgtacaaaagacgccttcaactgattacaatctgtatcaggctaacaaattagatggtgcctatcttgatgttcaggcttcaaagagactgaagggtcaatctggttatacagtctataaactagatagaactgaatacttgactttcaatgtatccaagcatccagaactagctaatgtcgattttagaagagcagtttcaatggcacttaaccgaactcaattggctaaaacagttggtggtgctaataccgtagctcgaacttttgctggaccaaatgaatatgttgatggtaagaattttgaccagtatgttgaaagcaaaaatccagctaataagtatatgaattataaccctgcaggcgctaagaaactttatgatagagcattaaaagaattgggtaagaataagttgacctttaccttaatgggtgacgatgatgacgtttctaaaaaggttttagagtttgtgcaaagccagttagaagatacctttggcaaaaaagttgatgtaactgttagaagtatgccgaagactactagagttaagaaaatgctcaatggtgatttcgaggcagtctttactggattgacttcgggctatttagatcctaattcacaattgcacacaatgatgacaggacaaagttataacttcggtaaatggcctaacaaagattttgacaagtatatgaataattcagataaggaattaaatcctactaagcgattagaagatttgtataatgcagaacgtgttttaactgatcaacaaggattgacgccattattccatgatggtcaagcttggatggttcgaccaagtgttaaaaatgtagaattcttgggtggtaatttcagctttaaggatgcatctgtaagtaataattaggagaaaaataatgactaaaacagcttttgtaaattgtaatttattcgttggtaatgaagataatctagtagataatgcttggtttgtcgttgatgatgaaacaggtaaattgaccgatcaaggtaagggaaaatgcacagcagattttgacaaacaagttgaccttaaagggaaatatgtgatgagcggtttgcttaattcacatactcacatggggcttgattctgacttgaagaaaaaatttccgactactgaagcttcgactacttatgcagcactgcgggatctgcgtgaagctttacaaactggtgtgacttatgttcgtagttgtggcacatcctttgatgttgactgtaaattagtgcagatgcgcaagcagtatccttttgaaggtcctcaagtgatgccaactggaatggcaatgtcaattgtcggcggacatggtgatttcaaggtggggttaaatggagagcaaaatgctagtcatttggttaacggtccagaggacatgcgtcgggcagtgcgtgaacagtttgccaagggtgctaaaaatgttaagctgatggcaactggtggaattatgtcattaggtgatgaagttgatgatactgaactttctcttgaagaaatgaagatggcagtagaagaagctcattctaagcatatgacggtttgtgcccatgctgaggggagacgcggtattcattatgcggttgttgcaggagttgattcggtagaacatggtttttatttagatgataatgacttggctttgatgaaaaaacaaggtacatttttgtcaccaacattgactgcaggtcggacaatcgtcgttcatggaaaagatgttgtacctgagttctcataccgcaagatgtgtgcagtagttgatgacttttataatcatgtcggccatgcgatcaaggagggggtgagactggcaatggggacagacgcaggaacatatttcaatcgcttctctgatacacctaatgaattagtggaattggttagagcaggagccacaaattatccagctttaagagcaggcggtttgggtagtgccgaattgcttaaggttgatcaagaatatggttcgcttgaagttggcaaatatgcggatttcctagttttgcgggataatccactagaagatgttgctgcagtcggccaaaaagacaagcaagtttaccaacatggtttacgtaaattctaaatattttttaccacaaataaggcatcctcgtgagatttttcttgcggggatgcttgtttgtgtagttcaaattaaagtaaacattttactaaattttccagtaaaagcgaataaatataacccaaaatataaaaatagttcttgatttagtatgaattacgatgtagtatttaaaccatcaaacgtattactgatgatttgaataagtggagattgaaatgtcaagttttcaagaatactactcagaattacaggaactagcagggtatttactacacaatccagaattaggctataaggagtataaaacttctaaggcagtggaagcagaaattgctaagatttctactaatataaaaatcgaacattattgtaaaacaggacttaaggtaatgtttgataatcattgcccaaaaactattgggattattgcagaattggattcactttatcagccaggtcataaggatgctgaccctgaaacaggagcggcgcaagcttgtggtcactatactcaggtgacaacagccttggctttgataaatgaactgatgaaaaatgatcgtctcaacgagtttggcactaatttggcttttatttttactccagccgaagaatttgtagatcttaattggcgcaaaaagcataagttagctggtgattttacttactttggaggtaagcaggaagctatcaaacttggcgtatttgacgatattgattattgtgtatcagttcatgctataggtgaagattttgagcgtaggactattgaaattaattgtgatttagctggatttaattttcaatactttgacttctttggtaaggcgagtcatgcagcatttgctcctgaagagggggtaaatgcacagagtatagctaccctatttaccactgctttggccttcaaacgtcaacaattaaaaaatccaaatcaaattaggtttaatccagtgatgataggtgataatacagaatcgattaatgtaattcccgatcatgttagcatggggacagatatacgatactttgatgtcgaatatgcacagcaactaatgaagcaattcaatcaagcagcagaaggatgctccctagctttaggcggtaattttaagtcagaaacacaggttggctatttgcctttaaggtcgaatagagacatgaatgctttagtaaaaaatgtatttttaaggaatgacaagatttcagaattgattgaaaaccgaggctataccatggcagctggtgatattggtgatgtaagttatctaatgccaactattcagattggatatggtggttggaatggaaccattcatggctctgattttaaattagttgatccagtttttgtactggacatattcccggaatttatctttaacagtgttttagaaatatcaaataatcttaataaaatcaggacttatcgtagaacaaatcaggaatatcttgaacaattaaataaaatgggagcagaaaaatgaaatctttaaaaaattatggtccattaattattttagtgctattgattgacactattgcggaatttatagggatgcaggttttcaaaattggtaaaattgaagtttcaattctaccattagtattcgcagttattttagcgattattatttatttacttccattaaagccgattaagcaactctacaatgataaaagagtaaagtttgctggaaaatatatgattttaataatgttgccactaatggcacgttatggagcaaatgttgcacctaagattaatgaaattttatcagtaggttgggtatttctcattcatgagttaggtaatttaggtacaattttatttggactaccagtagctttattactaggattaagacaagaggccattggctcaacattgggattaggcagagaaggagaactagcctatattagtgaaaaatatacacttgattcaccggaaggtcgaggagtcctaggtatttacttaattggaacaatttttggttcgattgtcttctcaattttagcaccagttcttttggggatgggctttagttatcaagctgttgcgatgagttctggagtaggatcaagttctatgatgactgcagcttcttcagctttagcagctctggttcctaaacatagtgagacgattctatcatttgcggcagcaagtcagttgttaactagttttattggaacttatattatgtatttcctcgcagttcctttgcaaagattcatgtatgttcacttgactagtttgcttgataaaaagaaagaagtatacccagaacatgattagagaaaataatttttataaattaggtagagatgcattaattttattgcttagtgttagtttagttttatttgttcagtagattaagttagtaaaaaatcctaagagcaccccaattacacctgatacttttgccggcctaggtctattatggctgttttctctgattggcattattatcagtatgttaatgaaacgagttccgtggaagattgttagaggatttcccattctaggctgggtgtctatcgtttcattagttttctgtttgcttagtccatattgtgttcgtgtaattaatgcagtagattttttatcattaactacatcggtattagcctttgccggaatttcagtaactcatagattgaaggatttatcaaagatttcatggaagatcttaattgtggcattatttgtctttttcggtatgtatttcatggatactttgatttctcaaatagctcttaatttgagtggaaaatagaaaaaatatataaagccacgctcaacagcgtggctttttgaagtgtgtcgggcatgacattcatctagtccaatgaaagcttggcgtaccgcaaggtggaccgctctcgccaatcctatccaatatctatttagataaaatggacaaggaattggaacaaagaggcttgcgctttgttcgctatgtcgatgactgcaatatcttcgtcaagagtggtaagtcggctaagcgcgtgatgaagtcaattacatcatggctagaaagaaaactgttcttaaaagttaacactactaaaactaaagtagttagaccaacgaagagcaatttcctaggctttaccttctggaaaacgggcgaaaactggcaagcaaagccgggagacgaccgtaaagccaagctttatgacaagattagagaattgttgagtcgccataaagcagttgctcaacctctatcattagtctttactaagataaatcaagtggtcaaaggctggggtgcaggcgtttttggctttaacgcaaaagaagtcgcaaaaatgtggcaggaggcctttgatactccgacaagcatctccactgtgatttacgctgttattcctggcagaaagaataaagacgtggtagctgattttaaggatatttttgcttaaatagaaattttctctcaaataacaatccaaacaaaaaagacgagccaatgcccgtctttttattttcttgaaataaatttttagttaaaagttagcttttttaacgtaagtgttcttagaaatacgatagaaagtcttgccgtgtaatttaattgcgcgaccataagtgttaacgcggtgacctttcttcaaaactttcttattagcacgcttgccgttcttcttgtagacataagcattgtgcttcagagtccgcttaacggccttagctttcttggcagctgtctttttagcagcagcggcatcagtttgagtcttgtcagatgtagtattggcatctttattagcagtgtcttcagcgaccttacctaaagtaatatcagccttttcgttcatggtcttgcccataacgttaagaccgaattctaagctgccagcgccttctttataagcatctgctgagaaaacatagtcaagggatgagccgtctttagcaacattttcttgcttgccggctacaccattcaatgttaggctagcaaccatcttagacatgtcttgacctttggtcattggtgctttagagccatcaacgtgaataattacttcggtaactttaccgtctttaacattaacttgagcagagttgcccaagaacatagcagcttctgatggggtagtgctgccagttttggtaatagtcatagtgatagtttgcaagtcgctgttttgactagtagcagtagttgcagcaacattagtagcaggctgatcagctgcagacactacagctgatggtgccaaaacactagcgcttgcgagtaaagcaagtgatgttaaaatgattttagtattttttttcataaaagtttcctcccacgaattttaggtatcgcttacattataatcaaataaatgttataaatcaatatattttttgttattttatttttttatgagcataataaactgaataaaatatcaccttgaaaccgattgcatagttattttaagaactttataatagaaaagactaatagtaaaaagaaggatattagaatgaataaaaagttacttaagttaatcgcaagtagttcggtcgcaatgactttaatggcacctggagtggcatttatgcaaactaatccggttgtaatggccgctgaacaaagtcaaaagacagtgggaatgacggtttacaaatacagtaaaaatcaccgcagccatgctaagtcaatggctcaaggttttgtgggagataaggtgcaattaacagttagtcaaaagcatgtgactaagatgacaatccatgtcgatggtaaaaatagtccaatgggcaaggggcaaaacgtaaataagattgtaaaatccctcaagattaatggcgttagcggtaaaaaggaaaatgtttccgccgacaaatctagttttgactttgtttttgcaggaaaagctttcaaaaataatggttgggtcaagatgcaagtcactattgactttggtggtaagatgaccgaacaagcttgggtgaagtatgacaaggttagcggtttaactactagcaagaaaaagaccgacaagaagcaaaagaaggctagtaaaaagagcgtcaaaaaagttagtaagaaaagtacacacggtcagcgcggataaaaaggttcaaaatatcaattatgcggtctataaggcggatcgcagtggcgtttctgcagcaaataatttttacactcatcatgccaggattgaaaaagtaaagcagggctatgttatgaccttaaaagttgaggtaaagcatgggatggtgaccaaatttcagccggtttcactgggaattggttcaatttcaaacctgcgttttaccaaacaagctggcaaggatatctggacttatcaggtacacttcaagtcgctaaatcagttgaagaagcaggctcaggggagtctgcgcttgagcgtaccaattgccaatattcatgatcgtttgtttaaggtctggtttgcttttggtgtaaaaaatgtggcgcacagttcgactgtaagcaaggcattaaccgaagcaaatagtagcactgattcaagtagtactagtgatgctattactgcagctaatgacgacagtagtaaagatgcaaaaaatgctacaagtagcgctcaaccgcagtcaaagccagttaaaaagcagcaggcttcttcaaactctagcgtaaagccttcggcaaagacaacccccaagaagaaaaagatggcaacgattgcagcggtggaatatccatttttgcctgtgatcgcaggctttttagcatttgatgctgcaattattggtttggccttttacttaagaaataaaattttgaagagaaagaaataatgaaaaatatagctaaaattatctcttttcctttcttgttgctaacttgtttgtttatttttggtgtgactgttagtgcacaaagcgtgagttatcgcacttacaagtatggcacgcatcagacctcgatggctgatggctactatgcgcgtcctgctcaggttgtggtagacgacaatcagtacctggtaacgatgacgattcgcactaagaaagatctaagtccctatccggttcaggtgttaacgattgatggacaagcaccgctaaacgtagtaaaaacgcggcatggcagtgactatgattatcgctatagttttcgcactaataatttaaaacgtgatatttctagtcaaattaaaatagatgtgccacatgtttaccaagcaacacacaatattacttttgcttttaacactacacagttgcctaagttaacaaataaaaaagagcgagcaagtcatgcggaaagtgcgataaaacgcagcgcgccacaggtgaaaaacaagagtgttaagcctaaggagcaattggcacaaaagaagcaagcggcaatagctaacaggcaaatagcgcagaatgcacgcaatcaacgtgctaatcaacaaaggcagcgaaatttttattatgttattttggctggagtgcttagttcgttaattttaattggcgttgctgttttgattgtcgtaaatgccaaggaaagaaaaagtaaatgaaaaaacgtaaaggattaattattggtttaattatatttttagtagcaatcgtcggagtggcaattggtgctaaacgattgattgatcaaaaagttgccaataatgaaaagattgttgccacaagtgcagcgattactgaaatttttgataaattgaacgttaatttagcaggggttccaaagacgcaggctaagttaccagcacgctatcaaaaggtgcccaagattgggagtccaatgaagccaagtgttgaaaagattgcttctttgaatcccactcgtgtctatgcagtctcaactttaaaagatcagtatgatcaatcatttaaagaacaaggcgttaaagttacatatttgaagctggattcagtagctgaccttgaagctacactgagttcattaggcaagcagtattaccggcagagacaggctgattatcagattggcttaatcaaaaaagccgttaaaaaggctaaagcacgtgttcacagtcgtaagcctagagtattgatcttgatgggcttgcctggcgctaattacatgattctaactaatcgatcatatttaggtgatttggtcagaatagctggtggggaaaatatctatcactctgatagtcagatttatttgtcaccaagtaatgactcgctagctactaaaaatccagatgtcattttgcgattagaacatgctttaccaaatgtaactttgccacaatttaagcaagagtttaagaaaaattctgtttggaagacgatgaaagccgtaaagacaggcagagtttatgacctacagcaaccagactttaatgcttcagctaacatgaatgtttctcaagcattgaataaattaagcaactggttgtaccctggaaagtgatcaaaatgaagaaaaaggtaatttggataaacttgattttagcagttttgttaatcagtacgattttctttgcattaactcacggagcaagcaatttttcaatgcaaaagatgactaacagccaattgaatattttgtttaatatccgtgtcccgcggattatttcggcactagtagcaggatctagcctctctgttagtggtgccttttttcaggcaactttgcgcaatccgattgcagaacctggaattatggggatctctagtgcagccagtttatgtcaattgctagcggttattattttgccagaaattttctttggtaaaattattttcgcgattattggcggactgctagcgtttgggcttcttttattattccaaaaaaagatgacgccttatcagttaattatcatcggagtggcattgaatgcagtgttcacggggatgcaggaagttttcactaatagtcaaaatagtggcagcagcctggccacaagtagttggggatcgacgatgtatttattgattattggcgtagtagggctgattttcgcgatttgttttatgaattgggctaattacttgaaggtcaatgatgaagagctgacgtctttaggtgtttctgctaaaaccctgcgtttagtcttgatgctaattgcagtggttttggccgcaacaacaacggcttgcattggtgttttagcttttatcggaattattgtgccacaggttgctcgtttgcttttgggatatgattatcaaaaaatcattccattttcgatttttgctggagcttggtttttattgttcgttgacaccatcggccgggtgattacagcaccgaatgagattgcggctaatattattttggctattgttggtggtccagttatgattttaattttatggaagaggcagaaaaatgcttaaagcgtcgcagattgatttttcatatgggtcaaaacaattatttaatcaattctctctgagcctgcaggagcaccagattacgactttaattggtcctaatggatctggcaagtcaaccttgtttcgcttgcttacacgggcaataaggccgtctgcggggacaattacgctagatgggcaagatatctggcagctagctgcgaaggattttgccaaaaaggtagcaattgtccaccagcagaatcaattgtatgatcagataactgtcaaggaactggttaaaatggggcgtctgccgtatcattccttgatgggggatgaagaaaatggatctgctcgccttcaacagattatgcaggagctagagattgctgatttggcagataagtttatagcgcaattatctggcggtcagcagcagcgtgtgtggcttgctacagcactggcgcaagagccggaatatctttttctagatgaaccaacaacatacttggatttgcattttcagtatcgctttttggatttagtgaaaaaattgaatcgaaagcagaatttgacgatttgcatgattttgcacgatttgaatcaggctttgcaatatagtaatcaggtaattttgctcaaccaaggcaggattcaaaagcagggcaggccagaagaggtaattacggcgcagacgattaggcaaaactttggcatagattgcgagatgatcgaaactgagcagggaaaagtcttgttaatggcaggttctgaggcaaaataaaagaccacgagaaaactcgcggtcttttttgtaataataaattattacttgttaacttcatccttgaagctcttacctggcttgaatgctggaacgtttgatgcagcaatttcaatttccttaccagtttgtgggttacgacccttacgagcagcacggtgacgaagttcgaaggcaccgaagccaactaattgtaccttgttgccttcagcaacattgctcttaacaacgtcgatgtaagcgtccaaaatagtgttaatgtctgtcttagtagcatcagtctttgcagcgatttgatctactaattgtttcttagaaatagtttccatgaaaaatacctcttttaatataaactacgattacttattttaacagtaatccgcgtatttacaaggggaaacagcctctttaaagaatttttttaaaaaggaaagaaattctatgtatttgaagcgaaaaatattgtattcgctatcaaaaatgtagttcatgtaatgattcttttgttttgatttgaaaaattaacttttttcaaaaaatttagacattttttgcgtaataaatgatgggagacaagcctaaattttgaattccaaattttgtacagtgatggaatatataagagaggtgaataatctttaattacacaaaccacatcctcgaaatatgcttaaacaatatcaattaagaacgttgaagaatggattaagaatggcaggtataagactatgagcctactaacttataaaggttaccaaggtacttatcgaagttgaaaatgatactttatttggcgaagtcttaggtctagaaaatacttttatttcttatgaaggaaattctctggcagagttgaagaaagatttcaaagcgggtattgatgattatcttgagaattgtcaattgaatcatgagcaaccagaacaggctaaccaagatgcagctaagttacagttgcaaaaattattattaacatcattagcgtgattggaacaaaataaagctcgaaacttctacaaattgtagtaacttcgagctctgcattaatctgtttttgttcaatacaacgcatgctattacatattggcaaatcgatctagttcatcatgtgttcctaatgcaaccaaaactaggattagttcatgtgtttctttatcaatccggtagtacaatagccaatcgtcattatattgacgattaacgtgcattttgcgattttttcctacagggtgatctttatgtttggctagaaattctttgtcattggttaatattgcttcaacacaatcatcaacataatccattggataatgttttctttcatatctcttgtaagcgcggtagtagcgcttggtaggattaacttgcatgattatttccgcatggcctttttgtattcttcaaaagagctataacttccatgataaatgtgattatcagcttcatagttcgcttcatctagttctgtcatgggtcttagttctaaaggaatgccattacttctaacaatagctttgaaatacattctaattcctgttgatatgtcaaccccatatgaagcaagaatatcttgagcttctttttttaatttatcatcgatttttacactaatttgagccatagtacaacctctattcgcaaaacgtattactttatctatatagtactatatactataaatacaaaatatcaatttttagcgtttgcttttaaaagaattttaaaagattataggtagtcttattatgaatactaggggaaaaaactaaaagtgacatttatatctttaatcgtaatacaccagcagaaatttaaacataaacaaagctcgaagcttctacaaattgtagtaacttcgagctttttgtaactattcagaaaagataatttagcggtcttcgtggttagtgaagtaacggtagtccttactcttgtcgaacaatacggcacgagcgttttcaccgttggagattgagaagatagcgtcagggtacttgttcttaacttcatcttctaccaatcctctaagcatttcgttgttagctaaaactgaaccggttaaagcaatcttcattggcttaggatcttcgtaacggtcaagaccgatgatgatgtcacgggctaacagatgagcttgtttcttaataactttgattgcatcatcgctgccttcatcagcaagttgtgcaacgtgaacagccattcctgcaacttctgggttagacatcttgtagaatttagcgttacattcatccatgtgttcaacgccaaataatttagtaaacatttgaatcaaagcgttgtcttcacgcttgtcccagctaagaagagcagattgcattgctgaacgagcaattgcgtaacctgagccttcatcacctaagatgttgccgtagccaccaactgcgattaagtggccgttttgtaaaccgttgtaaactgagccagtaccggcaattactaaggcaccgtcatcaccttcaagaccagcgtaaagtgctaaaagtgaatcagtaatagcacgagtaggtaagttgttaattcttgatgaaatagttgcggcaacttctggagcattaccgacaactgaaagaccggcaataccaacaagaacgcgcatgcagtcaccatcaaccttgtcgatcaattcgttgatagtgtcagagatattcttaattccgccttcgtagtcagcgttaatttggcctgggccgccttctgcacgaccgatttccttgccagtttcgtcatatgcgattgcagttgagtgggtaccacctgcatcaacaccaatttggtatttaagagccatgttgtaaatcttctttctatattaatttatccgaatgataacgtatacattgtattatatttttatacagtaggtctagtaaaagttttgctgttagcgctaacagtggcttttttcttgcaaattaataaaattgttaaactaattaagctaaccaacatccccagtagaagaacccatggtacataaattaatgtaatttgatgttttcctggattcaacttgaagtttaaaaaagcattcatgaacaaggttttattcttgttaattattttgccattatctaaaactaaccagttaatgttattaggaatagttgacgccaatgtcatcatcttcttcgttgtgaaatgattagatttgatgatcaaagcagatgtttgtttaaagtttggttgtttttgcttaaaacgatgtataatctgctcgagcttttgtgtgtttaagcgccagaagtgaatgccactaaggtctagtttatctttttttagttcaaaagtaacttgcaaccgttgaccacgctggtggctacctagattaatgagacgggcattttgatcacgtactgccagattaatattagcaccattaactgtcattgaaatggcattatcatcgatctcaccgggcatttcaatgtagtaagaatcatcagtctgtggtttgaaattgaaaatgatgcgtgcgatttgcttattgtttttacgattatattgtagttgatcgtttttcatactagttacattaattaattttgctttaggccaattgatctgcttaaacagctgcacttttgcccctgtaactgcttgaaagaatttggtttgattactagtaatatctagagagttaaaattgattttttgcgttttttgtgatgttaaaaagagtaggggcaaagcggcattatttttcactagatatagttgggaaaagcgtttttgcaaatgataatcgctggcatcaacgcggtggttggaattgtcatacttcatttgcttaccagacttgatcgttgtgatttcatcattgggcaaaagataatatttgattccaagtaaatcatctgtcaaagtagttccgccaaaattagtgtaggaattactattgtttagaaatccaagattgttgatcaggttgagtactttttgatcagaaatcgaattaaaattacttaaaccgtaataaccagcgctaaaaggatcatcatcagaacgatagaaagtcttttcagttcggtaaaatccagaatcatgttgatttgcgtattgtactgcttggctgacattagtggtaaagttctgataatcgctatttttttgataagctaaattgcctagagatagtactaggttgacgattaactcaagctcgataactaaataaaaaaatggcgcggcaaaactgtgttgatgataaataaagccaataaacaagattccgagggctagaaaagctcccgtggcaatctgcgcatcttcagttagaaagtcaaaatgtgaggcattaaatactatataaacaattaaacctaaagaaaatagagtcagaagtccggtctgccaataagctatacgttctttttgttctaatgcaataacgcctagatttagcgcaaaaaagatcaacacaaagctgaaacgaccaggataccagacagggaattggcctaaatgccagagtaaaaccagtggtgtccaaaaaagagaagcaattaagaaaatgagtaaaattccgtttgctaatttacgctgccagttaatctttttgcttaaaaaatataaaattgtcagcaacaagaaaggcattgtcagataaatgttgggcatcccttcctgcatttcatgaaagttataggccccttcggctaacttagtcagctgttcaactggagaaaactgccagcccaaattccatgaggcagtagaactagccttgccttgcaacatttcaatcagaacggggaagagcataaaggcatctaaaaatgaaccagcgatactttttcttaaataaatccagttaaggcgtaggcgctcctgcttattgatgaagaaaattttgcttaacagataaagcaaaccaaaggctaatgccataaatccggtataaaaattagtgaaccaaagcaaaaaggtaattaaaattaacttattttttcgttgggccagcaagcggtcgatggcattaatcaataaaggaagcaaaatcacagaatcaagccacatcagattatagtgattgccaataacgtagcctgaaagggcataagccgaactagccgctaaagcgtaaaagtgattagtgattttttgcttccaatagtagtaggaagatagtcccgccgctccaatttttaatgcgataataattaaaattgcttgtggcaaaaaatgttgcggaaataaaaataagagtagattgaaaggactgcagagataataggcatcagttgctagcattgaaccgcctaaaccattagaaaaggaatagattaagcgcaagggatgggagaacaaatttcgcctgaagaaggcaagaaaatcaacatattgttgacctaagtcgacagtgagcactccatttttgctgtagaaaaagtaactcaagaaaatcaaagccggtagcaaaaaactaagccagaaaaaaatatttttacgattaattgcaatgtgtcgtgagttaagaaatttaagcatcattaaaaattatataagctcccttatgaattgtagaattgatgtttactttttgttaaaatacatctagttttaataaaggtgatttacgtgaattattttagaaaaaatagtgggactggctcaaacaagcattcctcaactccaattagaatgcgaatcattctaggggtaattttagtcctctttgccatgttaattgggcaattggcttatttgcaactagtttatggttcacgtttcaaggcagaagtgcaaaaaactgattcaactgttgtttcgcatcaagtgccacgtggtgtcatgtatgacgctaagggacgcgttttagtaggtaataaagcaaccaatgctattacttatactaagagtgcctcgactacaacagcagatatttacaagatatctaatgccttgagtaattatatcaagattagcgatgaaaagccgacaaagcaaatggcagcagattattatttagctaatgaagataataatactaagatatctaatgctttgccgaagtcagccaagattgatgctgatggcaataagaagacttcagctgaaatctatcaagcggaattggcttatgttgaaaaaatgaatcctcaactaaccactcggcaaaaaacagcggctttaatctttaataagatttcaggggcttatactttatccacgatttatatcaagaataaaggcttaaccgatcgtgaaattgcccaagtaggtgagcacttatcagagcttcctggtgtgggtatcggaactgactggcaaagatcttatccaaatggttcatctattcaaagtatcattggttcggtttcaactgaaaaatctggtttaccaagtgatagcttgcagtactacttaagaaatggttactcacgtaacgaccgggtaggtacttcctatcttgaaaaagaatatgagccacttttgaagggaactaagtcgactaaccaggttattactaaatcgaatggtaatatccagcagactaagactgtttataatggtcaagccggtgccagcttaatgttaacgattgacgctaagtatcaaaagcaagtacaggctactttgaaacgggtttacagtacagctgttggtaacggtgcagcaagatactctaatggtgcctatgccgtggcgatgaatcctcagactggtgctttgctagctgtagccgggattaatcgaaacacgaacactggtaaaacgactgataatgctttaggtgtaattaaccaatcctttgttatgggatcagttgttaagggggctactgttggtggtggattaattaataaggttattactcccgaaaacaatactttgcctgatacggcaatttatttgccaggttcaccagttaaaaagtcagtttatccagttggtactttcagttcattggatgctgaaacagcgttggaagtctccagtaatatttacatgatgtacttagcaatgaaatgggttaaggctagttatgtaccgaagagctacattcatatgccaaacgatgcctttgacattttacggcgtaattttgctatgtttggcttaggtcaaaagacaggcgttgacctacctggtgaagtgtcaggaattgaaggtaagtcatttaatgacaagggtaatattctttccggttctgtacttgacctagcttatggtaactatgatgcttatacaccaattcaactagcccaatatgtgtcaactattgctaatggtggtaagagattgcaaccttatattgtgcaatcagttggtaaaactagcaaagatggtaagaagatttacattagctacaataagaagccaaatgtccaacaagtaattccttggacgcttgcggaacttaatgtggttcaaacagggttctatcgtgttgttcacggtacgaatggttggggaactgctcacccattgaagaatgttaagccatcaatttctggtaagaccggtactgcacaaactttctactatgatgctgaacaccctaatagaaagcacaatatcgaattgattaactcaacctttattggctatgctccatcgaaaaatccaaaattagcagtggcggttgttttcccaggattagaccctgatggtgaaggaacatacacattgcaagttgccaaagcaatggtacaagattatttcaaacttcattcaacaaaataaagaataatactggtcaaacagcttgaaaaatgctattctagtacagtcagaataaaagtgtaggtggtgaaaaaaatggcagataacatcattttagaatgcaccgaatgtggcgatagaagttacttatctaagaaaaacaagcgtaagcatccggaacgtttatctttaaagaagtattgcccagttgaaagacgcgcaacacttcaccgtgaaactaagtaataaaccaagatagcaggctacgtgcctgctattttttgttttttggacaaaaagatggaaaaatcagaattaagaaaagaacaaatcagtaaattaaaagaatttgccaatactaaagaaaaaagagcagaagatgcgattttattagagaaattaatgtcgacagatctaattagaagaagtcagacgattggggtaactgcttctttaccactagaagtagatacttctgaattaattgctcgtttgtgggataaaggaaaagaagtttatctggcaaaggcacgaagcgatcaaaatcatactttagactttttacgctatacgtatatgagcaaattggtaaaatctaaattcggtgtggaagaagtcgccgatgaagatgcgaaaatcaataatgatttggatttagtcattgtgccaggtttagcctttgccttagattcgcatattcgacttggctttggtggaggttattatgatcgctttttggctaagcatgatcctaaaactgttgctttagccaatagcaagatgacgttcgatactagcatttggcctatcgaaaaaaccgatattccggttcaaacaattgttactcctgataaaatttattaaaatagtcacaatgacgaagataaggggggattaaatgaatactaaacgaaaaattaacctctcacaatcatttgtgactttaggaattttagtagttttattaatagtctttttagttgaagtgtttttaggtggctcagagaataccaatgtcttgatgaaaatgggagccatgaataattttgcggtggtggctggacaccaatggtggcgcctatttatggcccagtttttgcatattggcatcatgcatttggtttctaatgccattattatttactacatggggcagtatatggagccattaatgggacatgtgcgctttttagtgacttatcttttagctggggtcggcggcaatctaatgagcttggctttcagtgctgatcgcggcttaagtgctggtgcctcaacagctttatttggtttgtttggggcaatgactgccattggcttgcgcaatttgcataatccaatgattgcttttttaggtcgacaagcctttgtcttagctttgattaacttagcgcttgatatttttgtgcctggaattgatatctggggtcatattggtggcttaattgctggcttcttattagcgattatcttgggcgatcgtgtaatgaagacctacaatcctaagtggcgcgtattggctgctgcagtgttagtcgtatatgttgtttggacggttagaacaggaatgataattaatttctaatgaaaactctctacgatgtacaacaattattagaaaaatacggaattttggttcatgtgggcaaaagaatttgggatattgaattaatggctttagagctcgataatatcaatcgtgccggtctgattgaccaacatgattatttgattgccaagatgattttgagtcgagaacatcgaattgaagtcaaaaatgaacaaaaaaaggcgctcaaagatccgaaaaatgatagccagtaaattagtttagcggtatcataatagatgtaagttttttatgaaagggcagatttagtttatgtcgagttttttaattgtcttagatttagttttattagtcattattttagtcatggttggtatctgggcttggaataaaattcaagctaaatcaatcggtggcgaattgactaatgaagaatttaaagaaggcatgcgtaaggcacaaattattgatctgcgtgaaaaagaaccgtttaaacgcaagcatattgatggcgctcgcaacttgccatataccatgcttaagtatcaatatactgagcttagaagcgacttgccagtttatctttactcagattcaaagaccattactttgagagctgcccgttttttaaagaaaaagggttttgtttctatccattggcttaaagatggctttgaagcttgggatggtcgaactaagaagtcaaaatattaaatgaaaagaagacgcatttggagggggtaactctaatgcgctctttttttgtatcaaaattaagaaaggtgatggtgatgaaaaaggtactagcgattgtaggaccaacagctatcggtaagacaaacttggcgattgatttagctaaaaggttgaacggcgagattatttctggcgattccatgcaagtttaccaagaagtggcagtgggaactgcaaaggcaactgcagaagaacaagcgcaagtgaaacactacttagttgatacgcaatccgtttttgacgagtattcagttaaagattttgtggatcaagcaacaaaagcgattgaagagattagccaaaaaggtaagttaccaattattgcaggcgggacaggtttttatgttaatgctttattgaataagatgcagctaggcgagaaaactccagaagagcgtagcgtttcgcaaaagtgggaaaactacctcaaggaaaaaggcgcagaaaaattgtggcaggtcttgaatgagcaagatcctaaggcggcagaaaaaataccagtagccaatagtcgcagaactatgcgagcattgactgtgattgagcgtacaggcaaaaagttttcagagcaacaaaagcagatcgagccgcgttatgattacttgattattggcttgaattctgaccgtcaagagatatatcgcaggattaatttgcgtgttgataagatgatggagcaagggatgctcgatgaagcaaaatttatttatcaaaatcgagcacgagagtatcaggtcttgcaagcaattgcgtataaggaatttttcccttattttgaagggcaagagacgctagagcattgcattgaagatttaaagacagcttcgcgccgctatgctaaacgtcaattgacttattttagaaataaattaccagtagtttggtttgatccgttagatgattcgggttgcgaacaaaagatattgaagaaagtcaaggaatggaaaaatgaataatttgccagaaaaattacaaaaaattgttaaagaagttgatcaacagatcgcacctaaactggttgagattgaagatcaaattgtctataatacggctaaagttttggcggcttaccaagctaatgatgtcgctgaagccgatttaaatggggctaatggctatggcgacgatgatatgggaagagataagctagataagatctatgctcaagtttttcaaactgaagatgcggtagttcggcctcaatttgtttcaggtacgcacaccttgtttgtagctctagcaggcaatttgaaatacggcgatacgctaacttatttaactggacagccttacgatactttgcaaaaagtgatgactgatgataagcgtggtactttagtcgagcgcggcgtgcatttttcatatgtgccgttaaccgatgatgggttagttgattatgacgaggctgaaaaggttcttaaacgtgatcagcctaagatcgttgccattcaacgttcacgtggctactccaccagaaagacctttacagttgatcagattaaggacatgattgcctttgttaaacgggtcagccctaagagtattgtctttattgacaattgttatggcgaattttcggaaaaacatgagccaactgagtatggtgctgacttaatggcaggatcgctgattaagaatgctggtggtggtctagctaagaccggtggttatattgttggtaaaaaagacctggttgaaaatgcaaaacttgcattgactgctccaggctgcaccgatgagggcgccactattggcaatttgcatgacttttatgaaggctttttcttggctcctaatgttaccggtatggctgaaaagggaatgatttttgcggctgctttgtttgccaaaatgggcttgaatgttaccccagcttgggatgagaagcgaagcgatattattgagacaattatttttggtgatcctgataagatggttaaatttgtgcaagaagtacagaaaaactcaccgattgattcctttgtaacgcctgaagctgtgcatatggagggctacgaagataagattattatggctgctggtaattttgtttcgggttcaactattgaattttcagcggatggtccaattagaccaccttatgcggtttatatgcagggtggcttgacttatgcgcatgacaaagtagctattattaacgcggttcgtgatacattttttaacaaaaaataaaatttaaaaataatcactagaccaatttgacttttttaaattggtctgctattgtattaaacagttctaggagataagaataaatcataggaccataccaatttaatattttttgtttttataggtgaattaactatgagtaaacaatatactgcagaagaaattaagcaagaagttgaagacaaggacgttagatttttacgcttggccttcactgatattaacggtactgaaaaggccgttgaagtacctaagagtcaattagataaagttttgactaatgacattcgctttgatggttcttcaattgatggctttgttcgtcttgaagaaagtgacatggttttatatccagacttctcaacttggacagtattgccatggggtgacgaacacggtggtaagattggtcgtttgatttgttcagttcacaccactgatggcaagccatttgctggtgatccaagaaataacttgaagcgtgttcttggtgaaatgaatgaagctggattcgacacttttgatattggttttgaaatggaattccatcttttcaagttagacgaagatggcaattggactactgaagttccagatcatgcttcatactttgacatgacttcagacgatgaaggtgcaagatgccgtcgtgaaatcgttgaaactcttgagggcatgggctttgaagttgaagcagctcaccacgaagtaggtgatggtcaacaagaaatcgactttagattcgatgatgctttgactactgctgacagatgccaaacctttaagatggtaacgcgtgcaattgctagaaagcacggtttgtttgcaagctttatggctaagcctgttcaaggtcaagctggtaacgggatgcacaacaacatgtcattatttaagaatggcaagaacgtcttttatgacaaggatggcgaattccacctttcaaatactgctctttacttcttgaatggtattttggaacatgctcgtgccattactgcaattggtaacccaaccgttaactcatacaagcgtttaattccaggttttgaagctccagtttacattgcttgggctgctaagaaccgttcaccacttgtacgtattccaagtgctggtgaaatcaatactcgtttggaaatgcgttcagctgatccaactgctaacccatacttgttacttgctgcatgtttaactgctggtttgaatggtattaaagaacaaaagatgccaatgaagccagttgaagaaaacatctttgaaatgactgaagaagaaagagcagaacatggtattaagccattaccaactactcttcacaacgcaattaaggccttcaagaaagatgatttaattaagagctcattaggtgatcacttaatgcacagcttcattgaatcaaaggaattagaatggtctaagtactcacaatcagtttcagattgggaacgtcaacgttacatgaactggtaaaaataaataagtaattggaaaatctcgtggtgattgaggccacgagatttttttgtaaagtatagatttttcaaaagcatatctaatcgtaattagtctaattacgattagataagtgaacttatggataagtttttaaatctagtaggataaacttttaccaaaaatcaaaaaatattctcttcaaagaagagcaaactgctatataattgtaataatgactggactggtatccctaattagtttagggatacttttgtgttaatgagaatgtattggagtcgatggaatgagaaataagacattagtagcattttgtttgatagctgcaatgatcaatttaactgcttgccaatcgcaaaagcagactaataatcgccaaactattgaaaaatctggtgtgactcagaaacagactcccaaaagattaattgttaagagtatgtcagatactgaaaaatctagtgcaatctcaatttatggatcgatgaaatatggggatgcatggaagactgcatatagtgatgccaagaaaaatcgtttgagcattagtgtaaaaaatcgaactggttttaattggataaaaaaaggtagaggctacatttatgaagtaactggcaatggtcaagaaaataatgctttttatacaatgaaaagtgaaaccgtatatttttataatcagaagaaaaatttaggtgtagcaagtttatctgaaatagcttcatatttaaatgaacataatcaagtaaaatctgtagaaaaattagcaactaagactactttggctgctgaagttacatctgacaaatatggggttaagggtgacgatggcctagcattagttccaacgagacttttgggtacttggtacaactataaaggaaagaagttagtaattactgatcatactgttaatggtgaagaaattcatcatatttctaattctggtgtagcagcagaatccttagatcaaacgaaaaagtgggctagagctcggatcgaaaatattaatggattaaattgctatcatgttcaaacattgaatgcccaagattttggcttactttattctgtccaaaaagataatggcaatacggcagtagtaacttatagcgttgatacaggtcattatacggctacttattggaagagcaccaagatagccaaggaacaccgaaatgcagaatttaagactttaaattaatatttgtaaagaagtattaaaataattgcaatgaacaaaaagtataatttttgtaaaataatcgtgtaagaagttggcggatcgtattttttataatactattaagcaaagagatagaattattgaaagaaaaggggattccttttgaaaagtaaattaactgttttggttgcaatttcagctgctttaactttagcaggatgtagccaaagtacacaaggtaatagtaattcacaatcacagtcagaaaaatcaagtcaagtttctaagagtaactcagaaaaaactggcacctcagaatcaagtaacagtcaaaactcagcaaaattatctgctgagaatatggactataagacgcaggctagtgcaatctctgtctatgctgcacaaaagtatggcgacacttgggaaattgcagttgatgctgccaaaaatggtaatttaggtgttgcgttcagaaccaaagccgcaacaggtattacttctgatgactcaggatatgtttatgaagtctccggtaccggtaaaagcagtaatgctcgttacatgttaagcggggatggagcacaaaagaaaattactatttttgttaagcaaagaaaccttggtactgtaactttacaagatgtagttgattacattaataaaaataatgatgttgatctagttcaaagcttggctaaaaatgccaaactagatgttaaacttgaaggcgataatgacaatgcagctggtgctaaggaatctgctagtgccgtaattccatcaagcttgcaaggtacttggtacactgcagatactggcaatggcaatatcgatactttgactgtaactgctaataagatcaatgatgaagctggttttagcatggatgtaaaggctaaaaattcaggttcatcaactagttcaggctatatgaaacaagctactattaatggaattaatttctatagttttactaatatgggtcaagaaccaggtcaaggcagtacatatttggcaccgcatactgaaaatggtcaaagtgtaattgtttcagctaactctaagggaacaactaatgctgtctactggaagagcgaagccttggctaagcaaaactccaacaagcaatttagcgatctacagtattaaaagtgaataaaatatagaattaggcgatatctttgtgatatcgccttttttgttgtgaaaataaatttctaaaattatggcacttcctttcaaaacatatgtttgatataattgtaaaagtgtttgggcagactaatgaactgactattgagtaataaggaaaggaattatatggattttttagctcaaaagaaggaataccgttttaaaaatattgaaaatcaagtgtgtcgtgttcatactcatttggctattaacaacaataatttgaaagtttggagagaaaatgatgataagaaaagtagaaaggctactaagttaataatggattcactacaagatgacaataaatacatgtttcctgatttagtaatagttagttcaaaatatttgaaggtagtagctgcttacgatcgcgaaaaagatgttatttatgttaataaaggtatctatactcatcaaattgttaaatcgcatttaaagtcaagttatttcgttgctaaagatatgagaggaattttgtggcatgaatatggatataaattacattgggatgcagttaaaagcttttataaagtacataaaagtaagtataatgatatatattaaagaagcaaagatgttttttgattctaaacttgagcattatataaggctacagtatcctggttattttaggaaagtaatcagttcgtatgcagaagatagttactttaaagaacataaaataaatgaggtagtagctgagttttctgtgataggaaatacgtgtgataaagaattgaatacaattattagggggatgctagaaaatgcaagtgctaaatgatttgaaaatgccgaataaagaaacactatattttaatgatcatattgtcccttggatagaaaaagaagagtgggctaataatgagcatacagaagtcgctttaacttttaagaaaaacaccccagtagatattattaataaatttttgatttgtcgatctgaattagcctattaactatactgcagattataaaattgtataggaagaccacatgttgtatccatatgcagaatttcctggggaattgtcaattacatattctcaaataatggtagacgataatgtaaagggtggtaaaaagcttttggtccactttgaacaaccgacagattatggatttaaagaagccagatatgagttgcctgattataaagaaatttacaactacgactttacaccttctgaaactagaaataatctagatattcttaagagaaacgaaagtctaatttggaagtgtgccgaagaggagaaaacaagtacctaattattttcggcttaaaaattttactatgactacaattgattttcatgactaataagaagaactcactataagtgggttcttttttaataattacaccactataatatcttaagtaaagctaaaaatgattcagttagaaaagagtaaatatgaaagtcttaaaaaaagtgggattagcgttgttgtcagtgatactggcatgtgtaattatcttctgtggctattatatatatttgtctctacattattatcgaattcctgataatcaaagattgaaaattaataacaatcagtctcagttattaaaagcgggggcgtagctataagacaacgacttataatgttggctttggtgcttataatcatgatttcgacttctttatggattcgggtcagttgaaggatggcaagaaaccgcaggggcatcgagggacagcaatatctaaacaagcagttcttgattccactaatggtgtcattcaaacaatgaaaaagcagaaccctgactgcatgtttttccaggaaattgatactgattcaactcgtagctttcacgttaatcaggtgaaaaaggttgaagatgattttccaaaaatggattcaacttttgctagtaatttccactctgcttttttagcggttccattgaacaatcctcatggcactgtacgttcagggttgttgagtatgagcaaatataagatggatagtgccataagaagaaaatatcctgtttctagtgggcctattgaaaaatttgtcgatttagatcgttgctttgtagttatgcgctttccagtaactaatggaaaagatttggtaatgattaactcacatatgtctgcttatgataagggcggtaaaatgcgtaaggcacagatgaaactgatttcttctgtgatggaaaaagaatatcgacgaggtaactatgtcattgtcggcggcgactttaatcatgcgttagggaaagacatgatgactcattttgagcaccaagaagaaattcctagttgggtatccgttcttgatcaaaaaatgctgcctaaagatttcactatgattaaggcgcaaaatcgcgaaaatgttgcgactgttcgtgctacagacatgaaatatgatcctaaagttaattatatgaccatttgtgatggctttattgtgtcgaaaaacgtgcaagcaaaggcgtataacattaatactcattttgagtatgcagaccataatccggttaggttggagtttgaacttaagtagatttggacaaaatgaaaaacactggatcatgaaactgtagatttatgatttagtatttacgaaattaacttatgaggtaaaatctaatgaaaaaagaattatcatataaaggttattatggttcagtggagtattcattagaagatgatactctctacggtaaagttattgacatcaacggtcttttatcatatgaaggccaatatggggtgaaataagatgagtaagattcaagagttcatcaagaaagatattgagagacatccagaattaaaaaaagaatatgaacaggtagaccttgatttagatgcttcagtattagttaaagatatgcgcgaaggttgggaaatgagtcaataagactaactgaagaatagttagtaaaataatgaaaagcattaaaattatatttgacttttaaaatgatttagactattatcttaatcaacataattattaattatttagcgatgataaggaaagtaaattggcggtccttctacagagagttatcacttggtgaaagataatgatcgacctacttttgaaaatggcctttgagcttgaagctatgaagtttttagtagcttctgggtccgcccgttatagcggtaacgtatcgccagacggccgtacgcaattcaaggtggttttccataaagataggtggtaccgcgttactgaacgccctattagatcaagttgatctagtaaggcgtttttctttttaccgtttttagcaaaggagatttttatgagaataaataaaaaagttgtttcattcggattaatagctttaactacggcaaccttagctgcttgtggtaagcaatcagatagtaataccgtttcaaaaaagcaggttttaaattggtcagagatcacacagctttctacgcaggatccttctttggcaactgatactaccagttttcaagctcttcttaataccggggacggactataccgccttgataaaaacaataaaccgcaattatctctagctactaaggctaaaacttctaatggcgggaagacttatgatttttatcttagaaaaaccgcaaaatggtctaacggcgatccattaactgctaaggattttgtatattcttataagcgtactgttaatccagtaactaagtctcagatggcattctatctttaccagatcaaaaatgcgcaagcaattagtaagggccaaaagtctccggataccttgggtgtttctgctccttctaaatatcatttgagaattcaattaactagaccactgccttacttcaagattttattgtcgtggccattatttttcccgcaaaatcaaaaagtggtgcaaaaatatggcaagttatacggcacgcaagctaaatacacagtttcttcaggcccattcacgcttactagatggaatggtaacaacaagacttggactttaattaagaataagaattactgggatgctaaaaatgttaaattaaataaagttaatgaacaggttagcgaatcaactacgactagctataatctttttgaagcaggtaaggcagatgagactggacttactggtgagcaagttgccgcaaataagaataaagcaggctaccatgcacgtttgtcttcagcgattaaaagattggaacttaacgaaaataaggttccagcattcaagaatcttaaggtacgtcaggcattttctttagcaattaatcgcaaacaattagcaaataatgtcttaaaagacggttcaatcccagctaaaggcttcgttccatcaggtatgggcaataatcctaagacaggaacaccatttgaagatgatgcttacgttaagagtgcagtatcgtataatcttgctaaggctaagcaattacttcgcgaagggtataaagaatctaagactaactcaattaaaattaccttgttagtttctgatgacgatacttcaaagcaaacagctgaatttcttcaaagtaagctagatcaacttccaggtgttcaaatttctgttcaaacaattccatatactcaattgatttcacgtcaaacagctggtaattaccaagctacaattaaaaactggcaggctgtctttggcgacccaatcaacttcttggacgttttccaaaaaggatcaagttatttgaacaatggttggaataacaatcaatttaacaagctgttgaatgaatcagaaaacgtatatggcaatcaaccagtaaaacgctgggcaagattagtagaagccgagaaggtattgatgaaagaccaaggaactattccattagttcaagttgctaagccacaattattaaagactaccgtaaagggcgtttcctttaaccctacaggcgttccatacgattttaagaacgttagaattggatagaaaaatagccgttgattacttgtataaaaaacaagttttcaatggctttttttctgttttgtgctaatacctaaaaatatccagttagatttcaggcttaaattctaaaacacttgaacaaaacaaaaacgccttcaataacagaagacgttttctagagtgcgaagtattatgaattatccaattaatctcttcaccataattattatatcaggtatataaggttaattggttaatactatctatgaaatatagttaaatcagatataacaaacgataatcatatcaggctatttgttgtatgcatcgtatttttcatttaagacagaagtaatagttcgagtcattctatcgtgatatttattattctttaaaagtagcgtagtaattacgtctattacatacattattgaaaactgtgagttaataaaccgagcgtcgttaatataatttgtatcttgaacaccaactacaatatcagcaagctgagctaatgggctattgtcatagctagttaatgctacaactgtagctttattcttttttgctagttcaatggctcttaccaaggaatctgtgctacctgttgaagaaatagctataatcaggtcatcttttgaaatgatactgctagtcataaacatattattactttctgtttccgcaaacgcagatatacccattcttagtaatctttgagtagcttctaagctggtatatccagaagaaccgataccataaaaataaactctctttgcagatttgatgagttggattatcttttttaattgttttatatcaagtttattttgtgtttcagatagaactcgattgtaaaaatcatatacttggtgagcggtcgttttagagttatcttgattagtaatagtatttacttgtgaagaagctgcagcagcagccaatttgacttttaaatctgtaaaactagagcagttaactctacgtgcaaatctagtaatagtagcattactaacttttattgttgacgctaattgatttatatttgctgattgaataaactgtgggtcctgtaatataaataaagcaatttttctttcttgctgaggtaaatcgggtagcctattttgtaaatcagttaaaaacgtcatattgaaaaccttcttaatgtgttaaatcaaaaaaacagagaaagattttgtaatctttctccgcttaattatgctaaatttgtagttttttggcaaataagcaattacttattaaaatatttagcgtagatttcgtcagcgccttcaataactttatcagtgtatttagccattggttcacggttgtagccagcatgtacgcccatcttttgcaatactaacttaattgatgggtaaataccgttattaagaagggcagtgataatgtcgttcttcttgtgttctaattcttgtgccttagcaatgtctccgttgttgtaagcagcaatttcttctttaaccattcttgcattaacgttgtaggttgatccgatacagccatcgacaccttcaattaaagcaggtaacaacatttcatcgaatcctgaaagaataagcttatcagggaagcgctcacgaagtctttcaagtaagtagaagtctgcattagtgtacttaacaccgataatctttggatttgagaataatttagcaaagttatccaatgaaagtgaaacacctgttaatgcaggaattgagtaaatcaataactttgcatctacatccttaacgatttcatcgtagtaatgcttaatttcgtcgaaggtaaagttatagtagaaaggagtaactgcagaaattgtcttgtaacccaattcagtaacgaacttagctaattctttagcttcttttaagtttgggccacccacttgagcgatcaagtcaacttgttggtcaacttcgtcccaagcaatttcgaagatcttcttcttttcttctaagccaagcataaagttttcaccagttgaaccgccaacgtataacccgtcaacaccttcaacatcgatatcgtgacgaatgatttcacgagtacctttttcatcaatattaccatcttcatcaaatgaaaccattaaggctgcataaactttttgcatttgtttgacctccgtttagtcaaaataaaataatatttttttaattactgtataactaatggcaaattcaaccaacacctgcagtatagaacatgaaaacgctttacgcaactctaaattgcgaaaataattttcaaaaattgaacaaagcgtaggtgtatcaagagatacagagcacgaaaattattttctaaatttttatttgagaaaattgtttttaaatgatactatgaaagcgcttaatataagaacttgattatacaggaaggcgtgaaccaaatgagtaagaaatatttagcttttgatgttggcggaaccacgattaaatacggtattgtagatgagaatcttcagatttcagatagaggcaaagttgatacattacataataaggacggacatattttgaagtcacttattaaagttaccaaagagatgatacagaagtatcaattagatgggattggtgtgagtaccgccggtattgttggagacgatggaagcataatgtatgctggaccaactatttctgactatcaaggtactcccattaagaaagagctagagcggacatttaaaattcctgtcagtgtcgttaatgatgttagtgcggctttattaggggaaaaattagctggaagtgttaaaaatgctagtactatctattgtgttgcattaggaacaggaattggtggtgcattttgggcagatggacatttatttaatggatatcatcaaacgggtaattcaataggatatacattatttgatccaataacatcaactaactatgaacagcggtcatcaaccattgcattacaaaaagaattagaacccttaggtattgatcctattgaagcctttgcacgtgccaaaaaaggaagccttagagaaaagaaaattattgatgcttgggccttgcaagttgcagagggcttaagcagtgtattattacttcttgatccagaagtattagttattggtggtgctgtttccaagcagggagattatttaaaagatttgttggacgaaaaattgaatcagattttaccgccaaatctatgtaaaaccgtattaaagatggcttctttaggtaatgatgcacaactttatggaggtatttctagcatttttgaaaattaatttctagaaatcgcttgcaataaaattgttttcgtgtatgctagaggtgtattaactaatagcaaaattcaaccgtacttatgtgaggcaaatgctgagcataattgtacggtttttttaatcccgtttattgaagaaaagaggcaagtcatgaaagtttcagtgaatgcggcaatctttgttgatcgtttgaatagcggagagagtcaaattgattgcttagaggatgtttcaaatttgaaagataaaattgacaatatccaagttcgtggagaattctttaaagaaaacaccaaagacgacgaactcgaagcaatcaaagcattgtgtaaaaagaacagttggggattgtattattcagttcctgaacaatttttcattgatggacatgtcaataacagtttgaaagacaatgttgaaatggcaaaaaagcatcaattgaagcatttgaagtatttcgtaggtgacgttaaagatgttgaccaaaaggaaattgaggatgctgcgaagcttcttgaagatgctaacgttgatttgacattggaaaatctttctaatgaaacaggctatttaagtactgttcttaaaggtcttgaagcagtaaatcaatatcctaatattggcttcacttatgatgcaggtaattggtactgggttggtgaaaatcctgaagttgcctttaaagaattaaaagataaggttactaactatcatctaaaggatattaagaataaaaaaactgtgatgttaggtgaaggaactacagattgggaaccaatgattttaggacttgatcctcaaattccaatcttcctagaatatggcattgatgataacaagattgaacaagaacttgacaaggtcaatgctgttatagacatgcggtaggtgactttgatgacgtaccttgtacaactatttttgattctgctattaactaaaattgcggcacacttttcagttaaggcaaaaatgccaagtgtaattggagaattattagtcgggattttagttggatcagctattttaaattggattcagcccaccacattcattaattatttttctcaactaggtgtaatcgttttgatgttcattgctggcctagaaggagatttgaaattattaattaaatattgggctccagctttaactgtagctactttaggagtaatttttccaactggtacagcatatcttctgtgccatacggcttttggattttcagtaaaagcatctatatttatgggcttagttttaagcgcaacatctgtaagtattacggttcaagttctaaaagaaatgaatcgtttaaatactcgtgaaggtgcaattatctgtggtgctgctgttgctgatgatattatctgtgtcattttattaggaatttgctccagtatctacggtggtggtcaccatacatcaatcattaaaatgatcattccgatggtattattctttatcattgttttgcttattggtaagtatgttgtgccaaaattcttagatatttttagtgatcttaatgcttctgaaagtgatacagctggtgcgatgattctttgttttggtgcagctgccttagcagttgcaatgggaatgagcgatgttttaggcgcatattttgctggtttagcaatttcagaaactaattatgcagacagattatcaacaaaaattgagccaattggttatgcagttttcattcctgtgttctttgtaagtattggcttacagattagttttaatggcatgggtaaggacttattgtttattgccttactaataattatagccatcttgggtaaacaaattggttgtggtatcggagcaaagatgttccatcttaattggacagaagcaaatattgttggtgcaggtatggtttcaagaggagagatggcactagttgttgctaatgtagctcttcaatcacaattaatagatcaaaatcactatactgcaatgattgttgtcacagtaatcacaacattgattgcgcctattatattgaaacttttcataatgcgaacacaaagaaaagaagtaaaaatgaattaaataaaaggggagaaaaattatgtcgaaaacaggattcggtatgtggaactggatcgtcttaatcgcatatttgctagcgatgttaggcgttggtgcttactttactaaacgggcaagtaaaagtacagattctttcttcaaagctgaaggtaaggtgcctgcttgggctgcaggatttagtatttgggctactactttaagtgcgatcacgttcatgtcaacaccagaacaagcttttttaactgactggggttattcgattgggacgttaacaatttatttaattattcctatattaattaaatggtatgtacctttcttcagaaaattacaggttactactgcttatgaatatctggaaaagcgttttggaccagtgatgcggtcactcggaagtttgctatttatgctttatcacattggtagagtagccattgttatttacttaccaattttggctattacttccgtttcaaatattaatccaatattgattgctgttttagttggtgcaatgtgtattatttatgcattcctcggcggtattgaaggtgttatttggacagatgttattcaaggtttccttctccttggtggtgctttattaatttgtattttagcagtcgtatatactggtggacctgggaagatcgcacaagttgctgtagataattctaaattcttatctgctaaagattggaatcctaacaatttagctatgttcattccagtaatctttgctggtcaattcttcaatagtatgtatcaatataccgctagtcaagatgttgttcagcgttatcagactactccaagtattaaagcaactgccaagtcactttggacaaacggttggttagcaattgtaactatttttgtattctttggtatgggtactttcttgtattgttattaccacacgatgggaagtttaccaaaaggttttaacactagtgctattgttccatactttgtaattaccaagattccagcaggtttagccggtttaattattgcaggtatcttcgctgctgctcagtcaactattgcttcaagtttgaatgctatttcttcatgtttcgtaactgacttcaagcaaagatattttgataagaaatggaagatgaatgatgttacactagctcgtatcattattgtcatcgccggtgtatttagtttaggaattgctatttacttgttgatgggtaatgcatctcaaacttggaatatcttcctttcaattactggtttgtttggtgttccagttgctggtatttttgctgctggtatctttactaagtcagccaaccgtgttagtgctgtctggggcgtattaattagtgctgctcttacttattggtgtcaagtaatgggtgttgcaacattggtacaaccaattgtagccttcattagttcattcgtaattgcttggttaattggtttggttactccaaaatatgcacatgatatcacaggtttaactgctaaaactatcaatgagaaggttaaggattagttgaaaaaggtgaaactataatgaaagattcaatgtccttaaaagatatggagtcatatcgaggtagattagaagttccagatgattttgatagtttttggagcaaagaaatcaaaaagatagaagcaaagccatttaaattaattaaaagaaattttggcgataatattaaaaacgttgttttttatgatttgttcttcaaaggtactgataacggaatagttcatgctaaatgcatttttccagcacatgaaaaaaatattccagtagttttctatttccatggttacatgggacaagctctcgattgggttgatttcatgcaatatgctgcgataggtgtaggcgttgttgcaatggatgttagaggccaacaagggcagtcggttgataacggtacttatgctggaaataccgttttaggccacataattcgtggagcagtggatggaccagatcatctgttttataaaaatgtatatctagatgtatacacgttaattgaaacagtcgcggatatgtcacgtgtagacaaggaacatctatattcttggggtggatctcaaggtggtgctttatctttgattgctgcggcattaaatccacgtattaaaaaatgtgctactcaatacccgtttctttctgatttcaagcatgtactagaaatgggtgatcgaggattgccatatatgatgagttatttaggtattttaagttttatgatccatttcataagacggaagacaagttgatgcgtactctgtcttatatcgatgttaaaaactttgctcatagaataaagtgtccagttttaatgtttacaggacttgaagatgatacttgttttccagcaacgcagtttgcaattttcaataggatagaaagccctaaaaaacacatgctgttaccagaatatggtcatgaagcaatgttttattatgttgatagtgccgcatttaactggctatttgatactaagttcccagaaaatccaccggacactagtagtaatgctttagaataaggtaaatttttaggagataaaaatgaaaaaagaagagtttattcaaaaagttcataatggattaattatttcttgtcaggctttacctggcgagccactttacaccgaagagggtggcataatgcctctgatggctaaagccgctaaagaagcgggtgcagttggtttgagagctaactccattagagatattaagcaaattaaggaagtagttcctgacctgccaatgattggtattattaagaaagaatatccacctgagaagccatttattaccgctactatgaaggaagtagatgaattagctaaaacagatgtcgaagtaattgcacttgattgtacattgcgcccacgtcatgatggtaaaactgttgcagaatttattgatgaaattaagactaaatatcctgaccgtttattaatggctgatacttctaactttgaagaagcaaagaatgcttatgatgctggtgttgactttgttggtaccactttgtcaggctacactgaagaaagtcctgtttcagatcatccagattatgatttagttaaagctttggttgatgctggaatgccagttattgctgaaggaaaaatccacagtccagaacaattaaagaaaatgattgatattggaccagccggaattgttattggtggtgcaattacaagaccattgcaaattgctaagacatttacgagtgtttttgaataaatgatcttctgattagttataaatttcccctctcccaaaacaagctacgtttgtaaaaggcagacgtagcttgtttatttttggttataaagtcgaatttttatagaaaaagcgaggtataaaatgtcatattttattcatgcaaagaagttttatttagatcatggtgttgaagaacgaggatacttagaaattcaagataatggacaatttggattttattattctgaagatgaaaaaccaaaaagtgctgcaattttagatttcaagaatttctcaatagctccagggtatgttgatacgcatattcatggattaatgaataatgatgttaacgactgtgattggaacgaaatcaataaaatttctgaaaaacttcttcaatatggtgtaacaagttggatgccgaccacagtaactacttcatctgagaaattagatgaaatttgtaaaacgtttgctgcacataaagggcaggaaaaaggcgcaaagatattaggtattcactttgaaggctcatacttcactaaagaacatggcggtgcagaaaatcctgagtttatggaggatccttcaattgaagaatttgataagtggtacagagattctgatgggatgctgagaaagatatcactagcaccagaacgaaaaaatgtcccacaatttgtcagacatatcgttaaaaaaggcgtagttgcttctttaggacatactagtgcaacatatgaagaagcacgaaaagcccttgacgcaggagctacaatgtttaatcatacgtttaatggtatgaacttattatctcagcatacacctaatattattggctgtgcattaacagctgacgatgtatttgatgaaatgatagctgatggtcaccatataaagccgatcattttgcagatgttgtttgatttaaagggacctaatcatattgtattaatgactgattgcttacgtactggtgggatgcctgatggtgaatatgtgcttagtggtatgaaagtaacagttaggaatcacattgcattgttagaaaatggtaaattagctggcagcacattgactttggataaagcagtaagaaacttagtaaattgggaagtatgtaagccatatgaggcaattaagatggcaacatatactcctgcacgtagtctaaatgaaaactgtggttgtatcctgccagatagggatgctgattttaatgtgctagatagtaatcttaatgttctaaagacttttgttaatgggaaagaaaagtatagcgtaaagtaaaaatattattatagtgtgaaaaaggcataggttgtgatatgaacctacgccttttcttatagttaatgtcttctttatctacttgaataatgattttctaacaggaaattgtaaagaattttattaaaatgatcaggaacttcagccatgatatcgtgaccgctgttagcaactaatgtagctttaacattatcgttttgttgagtcatccatgtggtaaagtcagaattataatatggacttttaattgctgcaactacaaagatcggcatagaggcattttgaaccacctttcgccagtctttagtagcgtgttcgcacaacaaatcaaaattgtcagttctgctaaatggatgagctaccttagcttcttttaaaccaggcattactctgacatctaatccgtgaagagtttcgtgaacattgggaacttttttagcttcttcaatataattgtctacagtataattcataaagccgtatttccaatcagttgtatttatcataaaaggtgtttgatcaattatgactgctaattgaacgatacttggttttaatctgattaaattatagagtacgctaccacccattgaatggcctataaaagccgcttttttaattcctagatgttcaactaactcaatcaaatcgtaagttaatcgatttaaagtgtgaccttttttagttcgctcgctacgaccgaaattacgatgatcgtaagtaataacctgatagccaagttcagaaaaataatctacttgtaatttcccaatctcttggtgaccaccaaatcctgtcacgaatataagaggtttaccattacctttcacatgatagttaattttaattccatcattagttagaaaattcatatcacttttctcctagtatagaaaacgagtaagtgacgtttaatgcatcattattcttgtatttgcttaatttataaaccaaaactaattttatatagccaaattcctagtattgctcctaaagttgtagcaactacaggaatccaactgtaatcccagtttgaatcccctttgtttggaataggtagaattgcgtgtacaattcttggacctaagtctctagcaggatttaatgcgggaccagtaggaccaccgccggccataactagtgcggtaataattagtccgataccaatgtttgcaatatcgatagattgtttaaagaacattccacgataaagtcccattgcgacaaatcctaaaatggcagtatcaatgaattcactgataaaaccgttgagcttattgtttaaggtttcaccagtggagaaacaagctaaaattgctccttcattattaggagtttctttaaagtacacccaataaatcgcaacaactagaagttgaccgacaatcgcaccaagcatttgagcaattatatattgaacaacgtgagcccaagggaaaattccgcatacggcttcacctatagtaatggctggattaatgtggttaccagaaatcgagccaaatagcatggcaggcaacataacaccaaatccaaaaccccaagcaatgaaattccaaccaccatttgattggccatcttttccattacctgtagtgccgtttaaaaatgaatttgctacagcaccattacctaaaattactaaaattgcagtaccaaaaaactctgcaatataacgagatatccatggtcccgacatatttcccactccttttaatataatgtcaacctgattatatgcagcttaagttagaaatgacaattctataaggcctagctaatagtaattgttattataactattaaataaagttatatggttaaaattccttgtaatgaaagcggtttacaaagggctagagactgtaaaatagtttgtgtaaggatgaatgattccttaaatttatttctttaaacattagaaaaaggagttcctttctcgtatgattggtttgaacaaaaaaacacatacagaaagaagaactccttcatgaatgattttaccaaagattttgctcaagctctattcaatccagacaaaataaatgatttattgcgcaaagagctacaacaggctgttaataacttgctagaagctgagttgactgcctttctaggctatgatccctatgccagaaatggctggaatactggcaattctagaaatggtgcttatttccgcaaggttgatacccagtttggaccaattgaagtgcaagtgcctcgagaccgcaacggtcagtttcatcagcacacgctgcctgactacaagcagcactctgatgttttggaaagcacgattatcaagctatactccaaaggcgtaactaccagagaaatcgctgacttgattgagaaaatgtatggcagtcattatagtccagctcaagtatcaaatatttccaagcagatgctccccaagattgaggcttatcacaagcgcaagctaagcgacaagtttttctgtgtctatttggatgcgacataccttcctttgcgccgagaaacgtttgagcgtgaagcagtctatattgccattggcattaaacctaatggacataaggaagtcattgactactgcattgctcctagtgagaacattgaagtttggacagagatgcttcaaaacatgaagtccagaggcttgaagcaagttgagctttttctttctgatggtgttgttggcatgaaaacagccttggccaggacttatcctaaagctcattttcaacgctgcctggttcatgtcatgcgcaatatctgcgctaaagtacgcgtcgacgatcgtgaaaagatcatgaacgaattcaagcagatacatcaacagacaagcaaaaaagaagctgcagctgtcttgcacaaattctatgccaaatggaataaagcttatagccatgtcatcaaaggtttgaaggaaattgagcccgatctgctagtcttctacaattatcccaaacaaatcagagcttcaatttattcaaccaatatgattgaatcctttaacaacgtcatcaagcgtaaagctaagcctaaggcagaatttccaactgaacagtcgcttgatgcatttattggcatccaggcaatgagctacaatgaccgttatttcaatcgaattcataaaggctttggtcaggttcaggacaccttagaatcctactttgattaaataaataattaaaaaatcaatttacgagaaagatctatttacacaaaagatttgacagtttcaagggctataataaataattcacaatgatatttgacttattatattagatataaccaaaagtaatatggcgcttacacactacgaggacaagcgcttacatataattcacaaaaatatttgaaaataattgtaaatttgaattttgtgcacacttgaacaaaaattaatggcgatgagagcgaaagatgagtttgttttttgaaaggacaaaattatgagttttaataaatacgaaaatgttttgttagatgaagcagaagatggcattgctgttttaaccattaatcgtccaaaagctttaaatgccttgaacttagcaactttgcaagatattggtgatgctttaagagaagttaaagcaagagatgacattcgtgtcttaatcgttacaggttcaggcgctaagtcatttgtcgcaggtgctgacattaaggaaatgcaaaatgataatgtaactgaagctttgaagttatcaaaacttgctcactcattatttggcgaaattgaacatttgccacaattcgttatcgctgctgttaacggttatgctctaggtggtggctgtgaacttgcatgttcatgtgatatgagaattggttctacaaaggctaaggttggtcaaccagaaactggcttgggtattatccctggatttggtggtactcaaagattaactcgtgttgtaggtagaggtaaggctaaggaattaattgctacctgcgacatgattgatgctaaggaagcatatagaatcggtttattcgatgaaattgcagaacctgatgaattgatggacaaagctatggaaatcgctcataagattatgaagaatgccccattatcagtagctcgtgctaagtactcagttgatagaggtgcagatttaccacttgatattgctatcgatcttgagagccaaatttgggctgaaatgtttggtactgcagaccaaaaagaaggtatggcaggattcgttgaaaagagagaaaagaactttactggcaagtaattgaaaaattaatgtgttttgtttagttgatactaggagataaattatgaatagagtcacagaattattaggtattaaatatccagttgtacaaggtgctatgcaagaagtagctactgctgatttagcagccgctgtttccaacggtggtggtttaggtattatcgctgctggaggcaagactccagatgaattaagagagcaaattcaaaaggccacgaagttaactgacaagccatttgccgttaacttgatgctgatggacaagaatacaccagagcacgttaaagtaattattgatgaaggtgtaaagattgttactactggtgccggcacaccaaaaccatatatgtctgatttaaaagctgctggaattaaggtaatgccggttattcctaatgttaagattgccaagaaaatggaagaaatgggtgctgatgcagttatcgttgaaggtatggaagccggcggtcacattggtggaactacttcaatggtattatggccacaaattgctgatgcaattaatattccattaatcgctgctggcggtatcggtgacggtcgtggtgttgttgaagcatttgttgctggtgctgaaggtgtacaatgtggtactattttctcaattgctaaggaaagccctgtaggtgataactggcgtaaggctgttattgacgctactgatactggtactgctgttgttggttctactattaagggtggtgctactcgtggtattgctaatgaagaagcaggtaagttgtttgaacttgaaaagacaggtgtatcaagagatgaatttaattcagcattgaacaaaggcttgtacgttggtgtaagagaagatgaccctgataagagtttctttatggctggtgaagttgctggtctaattaaggaatctaaacctgctgcagaaattgttaaagatttaatagatgatgctcaaaaagtattgaataaaaacatcgaaatcatgtaatttaaagccattttatggctgtggaattaatacataaaatatttataatcaagcattaaataaaggcgaatgtaatttcgcctttatttttttattattataagctataaccaatagttatgagaatgctgaaaattaatgatttcacaatgctggatgtaagcggtaccttataagtgtcaaggaattaaatgattccaaaattctactaatttgaaacatactctcatacatattattaaactcatctggtttccaattcagtagaaacgtagttagttagatttaaacataggaggataaatctatgtctgttaaagttattgacagtaaaactgcagcagaattggtcccagataacgctagtgtagctcttgatggctgccttggcactgatgtcgctgaagaaattcttgaaatgatgaaaaagagataccaagaaactggacatccaaaggatttggatgtttggtatggatgtggtatcggtgataacaaaggctcagccgttgaaaactttgctgaaaaaggaatgctccgtcgagtagttggtgggctttggtcgttagctccaaaacttgcacctatggttgcaaataatgattttgaagcctttaacttcccacaaggcacgatttcacaattgtttagagacgcagctgcccatcgtccagttttagtaactcatactggattggggacttttgttgatccggaaaatgatggtggtcgtttaaacgaagctgcaaagaattctactttggtaaatagaattaaaattcatggaaaagattacttggcttatgaaacaccaaagccagatgtatcaattttccgtggtacttatgccgatgaaaacggtaatatcacatttgatgacgagcctttgactatggatgtgactgctgttgccatggcagcccacaacaatggtggtaaggtaattgttcaagttaagcgtgttgttaaggctggtagtcttgatccaaagtcagtaagagttcctggcgttttagttgattacgttgttccaactgataatcctgaaatgactaagcagactaccgattacatttacaatccagatattattaaatctaatattgtaaaagaccccggatttaaaattgaagtgcaacactaagtgttaaacaaaaaggccatgaagacctaaacttgaagtgacgaaaaatcaagaaaggaagatctttatgaccaattcaaattctagcatttctaagcactatcatcaattaaccagcgtacaacgtggacaaattcaagcaatgctggattccggcataacttcccgtactgttatcgctcaagaagtcggctgccataagtcgacaatcagtcgcgaaatcaaacgcggaagtgtcctgcaaagagacagcagctatttattgtatgagcactattacgctgatactgcacagatttattatgagaagcgtcgcaaaaactgctatcagcgcaatccattgaagcattatgctgtctttttgagaatgctctccagacgctttaaagctaaatttgatgccaccagcatcgatgaattcgttggtgaattcaaaaggactatgccaggctacccttgtcccagcacaccaactgtctatcgctatattgatcagggcttgctggacataagcaatattgatctgcctatgaagctcaaaagacgcaggaacaagcgtcatcacggccatagcggtcatgctttgcacaagaagcatcttggcaattccattgaacagcgtcctaaagagattgaagacagaaaaacgccgctgcactgggaaggagatctggttaaaggcgtcagacgcaagaatcagcctgctttaatgactttgaccgaaagaaccacacgctttgaagtagttatcaagattcctgactatcgggcaagcacatgccaaaggctgcttcaaaatgagattgacagacatcctgcctggtttaaatcgatcacgtttgacaatggctctgagtttgcggatatgaccaagatcaaaggctgccagatctacttcgcccacccatattctccatgggaaagaggcaccaatgagaactgcaatggacttctgcgtcaattcttccctaaaggcaaaagcatgaaagataagtcagctgcttatgttcaacaggcaactgatgccattaaccgcaaacatcgtcgaatccttcaatatcacacagcagaagaactcttcaagcaatatatttcctcatagcctaactgttgcacttaatttgacaattcaggcctgaatttccttggaaaatatcaatttgtcatactatgaattccacggaagatccaacagtagaatacgctaaaaattggtttctgaaatacttttctaaatataaaaagatgtcaattgattaaaaattaaggaagaatcattatgaaagctatatttccaggcagctttgatccgataactaatggtcatttagatatcattagtcgtgcttcaaaattatttgataagttagtcgttgtcgtatcaaataatacctcaaaaaatggtatgttttctcctcaacaaagatatcaatttgttaaagaagcagtgtctatttatcccaatgtgtctgtgagtcttattcaaagcgatttaactgttaatttggttcacgaattaaatgttgacgttattgttcgtggtgtgagaaataatgaagactttgtttatgaacagcaaatagcgttaatgaccaagaaaatggcccccaatatagaaactttgattctattttcaaaccctgaatgttcatacatatcttctagtattgtaagagaaattatgctatttggaggcgatatttcagatgctgttcctgcttgtgtaaatcgtgctctaataagaatgaaaaatcaacatatggcaaggagcgtatcattatgaagactagaaaagaaattaccaatttaacgatcaccgctgtatttattgcattgctttttatccagacatttgttccgaatgttgggtatgtaagaattcttcctagtcttcctgcaattactactattccattaaccattgctgtttatgggactttaatgggaccgaaatggggattgggttttggattagtttggggacttactcgtttagttgtggcctatacacaaccaggggatatggtcagtttgcttttgttccaaaatccagtaatctctcttgttcctagtgttctagcaggattctttcctggattaattagtcagaagtttaaagatagggatgcacatattcaaaagatagggtatatgctcagtggagcagttgcctcgctgacgaacactattcttgtaattttacttaccgatttaatgtttatgtctaattcaagcactttaacaagttacttagggcattttagtcagtcaactccattgttggtaattctagtcactgctctaggtttcaacggcttggtagaagcgatatttaatgcaattcttgtccctataattgttacacctcttaatttagtacttaaaagagcgtaaatgatgaataattttattactgttgatcgtgatcattgggctaaattaaactctaaaattgagtctctttcttatgaactattaaaatattttatcgtaaattgcaataataaattgaacacttttaatcaagctgcttgatagattagatctaattctctttcaaagatttcatctggtgtatgatatgccaatatctttcttggtaaagagttgcaccaggtttcaatgtctatgatgtcttgtagtgaataattgtctattgcctctcccttaggaataaatctgcgaatgagtccattatgtctttcaacggttcccttgtcacaagatgtataaggatgagcatagtaaactaaagtatttgatacgtcttctaagcttgaaagatctgcaaactctgagccattatcagtggtaatggttttaaaaatatcattccaatgttcgctgtattgcctttggagttctttaaaggcctgcatgacactgacagaagtcttgtcaggaatacgaagaattaagaactcacgactcatacgttcagataaggttagcagcacctcatcatctttgctcttatgtccgagaactaaatcgcattcccaatggccaaacttattacgtttattgatttctttaggacgttcttcaatgcttctgccaagttttttcttatttctgcgaatacgatgaagcttggtattgcgtttaagcttctctggcaagtcgtaattatgtatatctaatagaccttggtcgacataattgtaaagagtcttagtacagacaacatctctgctgctaaatgcgccaacagcggtggcgcgattactgcacacatcaagcgaccagccgtctttaaagaaatgtttgtggacatagcgcatgaattgagttttcctgagaaagtctgatttacgtccacaatttttacgatgagcttgatatgcatcatgcccttgagtagccttatatcttttgactttgccatgatacagttctacagtaccgcgcttaacctcataactgatagtagaaggggaacagtttaattcacgggcaatggcacgcaaagaatagccatctttcaaacgcaattgaataataactctttcctcgaatgataaatgcttgcctttaatgtgatgattcatggtagaatgtaaagagtccattttgacctcgtttctaaatgttgtgtggtaactacattctatcaaacaggtccgaatggactttttattttttattaagtgttcaatttaattttacaatcagcgtaaaatattttattgatcaaaataagttacaggttacggtcaatgaacttcaagaagtatatatcccattagttcaatatatattgctttgtgttcaaaataagaaaatgttctctaaattaaaaacaaattacattaaaagcgctgatttaaaccagccatttatcctgggaattactggatcagttgctgcaggaaagtcaacgactgctaaagtaatagaggcacttattagtcaattttactctgatttagatattcaatcgttgacgactgatggctttatttatcccaacaaagtactggagcaaaagaatttaatgtcacgtaaagggttccctgatagctataatacatcgcttttaaataattttctttctcaagtaagtaatggggcagaggatgtttcctatcctgtatactcgcatgaactttcagacatagttcctggtaaatatcgtagcattaccaatccagatattttaattttagaaggaatcaatattttgcaaattcctgtaaatgaaaagaagattattagtgactatatagatctgtctatatacattgatgccgatgaaagcttattagaggaatggttcttaactcgctttaaatgcttgctagatattaataaagataatcctaataatttcttttatcattgggctcatattcctttagatgaatcaattgattatgcaaaaaaggtttggcggacagttaatttagttaatctacgtgactatattgcaccaaccaaggaaagggctaatatcattctttataaagatgtaggtcacagagtaacatcgattaagattcgaaaatattaaaagtatctcttttaaagcagttcatgataaatcatgagctgtttttcttgtcgtaatgatataagtgcatgtcatagtagttcaaagtgaagaggagaatcaagagcattattttacacttggagctattattgtaaatttccaaggacagaagtgggtatagagtcaatttaattgttaactctattttttatagtaaaaattaaaacaatataaaaatatattgcttatctaaaaaatagatgatattatttattaaatttctttaacgagatttaataaaatttataaaattagataggggatgcaagtatgagcaatttaacaaatccaaatgatcataaagatctgtcgtttttatttaaatcagtggatcgattggcagctttagaaacacaaaagaaggccgatacgattattagtgttcgcaagaagtgggtagctgccgcaatgattgctcttgcttctggatctaccgttttattaactagtaatactgctaatgctgcaacttcagacactaattctgaagcgcaggtaacagtacaaaatcaaaatacaacagagaataagacgtcagctgaagatacaactaatagccatgatgctgaacaaagtaatcaagatactaaggcgcaggttaatttatctcaacaaagtaatcaagaagctaatacagctgatcaaaataatacaccagagaatgataatcaagtacaaacaccaaccaatcaggctgatcatgttaaagggaatgttcaatctgcatgggaccagggatataaaggtcaaggtactgtcgtagctgttattgactcaggagctgatccaagccataaggattttcaaacaatgcctgaaaatcctaagctttcaaaggatgatattcaaaaaaagattgaacagcaggggtatgggaagtacgtaaatgaaaagttcccatatgtttataactatgccgatagagacaatgattacattacttctgatgacactaactcaaatgattctcctcacggtcaacacgtttcaggtatcattgctgctgatggaaaaccagatggtaataaagaatacgttgtcggtgttgctccagaagctcaattgatgcaattgcgtgttttcggtcagttctcagatgaaaaaactgatgatgttgctaaggctatttacgatgctactaatttaggtgcggatgtaattcaaatgtcccttggtcaaggggttgcagatcagcaattaactaatattgaacaaaaagctgttcaatacgcaattgatcatggtgtttttgtttcaatttctgcatcaaataatggtcattcaggttcagttgataatacaagtaatgtgacttctgtggaaagttatgaatctggaagtgcagatggtaattatgaaccacttaattcaagtacagtggccaatcctggtgcctctaaaaatgcattaacagttgctgcagagacttcagctactggtaaagatagtgacatggctggattttcatcttggggaccggtacaagactttactttaaaacccgatttggctgctccagggtatcaagtcgtttctactgtcaacaataacaattaccaaacaatgagtggaacctcaatggctggtccattcgcagcagcaagtgctgcactggtaatgcaacggctaaagaaaactaatcctgaattaaaaggagcgcagttggttgctgctactaaagctcttttaatgaacagtgctaaacctcaaacgcaaaatgggtatactacacctgtttctccacgtagacagggtgccggacaaatcgatgttggtgctgcgacttcgaatccagtttatgtaattgctgatgatggaacaagttcagtctcacttcatcaagttaaagaaaacacgccatttactttaactttccataatctaacggaccaagaacaagtttatacttttgatgactttggtggtggatatactgaacaaagggatagcaatactggagtttatcatgatgttcaattagcgggtgcacgcgtttatggtgaacactcatttagtttagctcctaaagaaactaaacaggttacgtattccttaactctaaacggtttaaacaacaatcaattagtagaaggttttttaagattcaccaatactaatgataaatctacggtttcagtgccatatttagcttactatggtgacttaactagtgaaaatgtttttgaccaaaatgctaatgaagaacaccccgacatccagggaaatcagttcgttaatgaacaaaattatcctcgtggtgttgctgatcaagaatcattaaagcaacttgttaatgtagaaggagattacaactggcaagaagctgcaaaattgtatgaaagcggaaaggtagctttctcaccaaataacgataataagagtgatcttcttaaaccatatacttatttgaaacaaaatgttaaggatttaaaagctgtggtccttgacgctcaaggtaatgtcgtaagagttgttgcagatgtgcaaggtgtagataagtcttatgatgaaaacggagtaacgaaagatacaagcttatcagtttcaatgagagataatcctgatgcgtttgaatgggacggcaaggtatataatagtaaaactggtcaaatggaagttgctaaagatggtaattatacttatagattagtagctacactttggaatgaaggacctcatcaagtgcaaactgcagatttccctgtagtaattgatactgttgcaccaacattgtctaatgtgaaatatgatgaagccacgaatactttaagcggtgaataccaagatactggggctggctttactaattattcatatgcgacagttacagttaacgataaagtcttcggctataaacttagtgatggccagtctgcttttgataatgctgaaaagacaaaaggacatttcagttttactttggacaaagatgcagttgctgcgttatcaggcgctaagaataaagtaagtgttgtcttgagtgatgtggctgataatcctgtagtttacagtgttaatgtagcaggaaaagatattgataaacctgcagttagtgtttggaatgctactaatggattagcatttgatcaaagttctactagttacaataaggatattaagacttacacgttaattggtggagcaaatcaagatttctatttgaatggtaaattagttcaggttcaaaatggtcagtattctgttcccgttgatgtcaattcaactaacttggtatttagcactgatgctgctggtaaaaatgtgttaaagaatttctcaactgtaactccaaaggcattctttaattggcaagttactgacacttttgcaggtaactttggtgtttcaatcaactctgtagaaactaatcgaaaagatgatgtagttgttcaagctgctgtacctaaaggcgaaaatatccaagcttttgccaaagattactttacaggtgaattatatacaggtgaagttaacgatggagtagcaactttccatgtacatacttcaattaatggtggcaggcgtgcattattaactggttggactgttgttaatggaccatcttataatgataagcaagaaactagtcaaagaggcgtagcaagttcaaatcacctaggtgtttactatgaagtagatgcagctgatcgtccagtttatactaaccgtaatcagctaggtgttgaagtaaaagacgaggcagcaaatgcggatacatttggtccaggagcatatccaggacatgctccatctgatttaacaactagaacagatcctaatccaaacattcattttgattatatgaatgataatgataccactcgttttggtcaaaacgcagtattaaagggttactatgatcccgctacaatgaagtttacggtaactggtaatgtagacgataatgtaaccagcctaaccgttttgggtgatagttctaatgaaaatgatcctgcaaatcaagttaaactaaatccaaatggtaagtttagctttgctgtgactgcaaatagtactggtcaacgtccaattgcttatctttacaagactaaggacggtcaaactgttcgtggtacattaaatcttatcttagacacagtaaaaccaactcttgaagtaaatcaagttaatggtaatgaacttgagctttggaccaataatcctaaatttgttttatcaggcaaggtaaatgataacttggatggttatagactctacgttaacggtaataacatttatcgtgaattcttaaactcaggttataatcgtttagaaggtttgaatactgatacagagtttacaaatccatatggcgatcatgaatttgagcaaattgaaaatcttaacgataataatgatcaaccaactactcatgtttttactgttaatgtagtagatcagactgggaataccgtcacaaagaaacttactgtgcactttgatcctaactatgtagcaccaacaagcaatagtagtacagttgatacagctgatacagttgatgttaatgctactcaaacaaataatggaactgagcttacagcctcagttgatcctttagtaggtaaatcatttaaattattgcataatgcatatctttacgatcaaaatggtgaagttgttttgactgatgttgagaatgctaagagtttgctcaaaaaaggacagacaatcgttgcattggataatgccaaagtaacccttatcaatggtgtgaaattctatagagtaggcaacaatacttttgttaaaacggcaaatactgttcttcaagcacctaagagactcaagctgactcacaatgcttatgtttacgatcaaaaaggtaatgttgtcaaaaagcatggcaagaaagttttacttaagaagaatcaatggattagtgcattgaacaatgcagataaatatgtaatcaagggtaggttatattacaaattagctgatggtcaatttgtaaaagtggctaatactgttactaaaaaagctaagttacgaaaaactgtagtgagttagaaatacagataaatagtcaagtattgtaattttgcaatgcttgactatttttgtgcttgtagtttgttttgaattttcttctgtctatgacgaataagcttaacgatttcaaagtacattttttggagaataacatattagcacataagcgagaaactagactaatgagaagaatttagttataatatttatgtaaacggtttctgcaaaaatagattaaaaatctaaacatagaaagaaggaaacttgatgaagaaaattattaatgatccgcacgatgttgtgccagaaatggttaacggaatgactagatcatatccgcaatatattgaaaaaatcgaaggaactgaagctgtcgttcgcgcagataaagcatcaatgaaagatagagtcggaattatcagtggtggcggatcaggtcatgaacccactcatgctggttttgtcggtgaagggatgctcagtgcagctgtttgcggtcaggtctttacttcacctacgccagatcaaatatatgcagctattaaagctgttaaccagggtaaaggcgttttcatggttgttaaaaattattcaggtgatgtcatgaactttgacatggctaaggatttagcaagtatggataatattcctgttaaatcaattgtagttgacgacgatattgccgttgaaaatagcctttatactcaaggaagacgtggagtagctggaacgatcttcatgcataagattcttggtgcagctgctgaacagggagctagtcttgacgagattgaagctttagctaaaaaagttttaccaaatatcaagacgattgctgtagctctttctgcagcaactaatccagaagttggtaaacccggctttatcctgaaagaggatgaaattgagtatggtgttggcattcatagtgagccgggctatcgtcgtgaaaaaattaagccttcaaaagaattagttgatgaattaattggtaaattgaacgatgaaatgcatcttgatagtagcaagaaatacgcttgtttaattaacggcatgggtactactccattaatggaacaatatatttttgcaaacgatgtcttaaataaattagaaacttttgatattgaacctagttttatgaaggtcggtaattatatgacttcaattgatatggccggtatttcacttacgctttttgaaattcaggatgataaatggctagattacttgaattatccagttaaaacaattgcttggtagaaaggaaaaacaatggcattaactactgatacactaactatttggatgaataagttcgctgacaaggttaatacaaataaacaatatttaagtgatcttgatacgccaattggtgatggagatcatggctttaatatggatcgcgggatgaccgcagttaaagaaaaattagctactaaaccagctgatttaacttctggttttaagacgattgccatggcgttaatttcaacagttggtggtgcatctggcccgttgtatggaacggcttttctagaaatggccaagaagagtgcctcaactgatgatattggtgagttatttgatgctgcgctagctggaattgaaatgcgtggtggcgctaaaccaggcgataagaccatggtagatgtctggaacactttagtaccagaggttaagagtggcaatttaactgaagaaaaaatcaaagatgctgttgaggctactaaggatatgattgctaaaaaaggtagagcgtcatatttaggtgaacggtctaagggacacattgatcctggttctcaatcaagtgggtatctttttgaagcaatgcttgagacggagggcttgctatgagcttaggtataactttggtttctcatgtaccagacattgctaacggattacctaaattgcttaatcaagtagcaaaggatgtgccgattactgccgcaggtggtacaaacgacaatgatattggcactagcatggaaaagattatgacggcatttaatgaaaattctgccgatgaaattctagctttttacgatttaggcagtgcaaaaatgaaccttgaaatggccatggaaatgactgataaaaaagttcatctctatgatgctgcttttattgagggagcttatacagctgcatcacttattcaagcaggcgtaggcttagacgatattgaaaagcaacttaaaccgctgattattaaagattaatagaaagagggcattatgtcaggattcataggagagttctttggaactttagtcttaattgttttgggcactggttgtggtgcagcaattaatttgcaaaaatcgtatgctaaaggcgctagctggctttatgtaactattgcttggggcatggccgttacattcggtgtttatgttgctgccagtcttggctcacaggggcacttgaatcccgcggttaccattggctttgctagttttggctttttcccatggagtgaagttgggccatacttgttgggtcaattcttgggtgcctttgtcggtgctgctttagtcgcaattcaattttatcctcactttaaggctactaagacgcctgaagaaggaaacaatgtcggcatttttgcgactgcaccagccattaagaataatattttcaatttcttaagtgaaacgattgctacttttatctttgtctttgctttactcaacttaggcgattttgataaaggattaaagccaattgcagttggactgttaattatggttgttggtcaggctcttggtagcacgaccggattcgcattaaaccctgctcgtgactggtcaccaagattggcatacacaattttgccgattccaaataaatcatcagctaattggggctatgcatgggtaccgatggttggaccaattgtcggtggtgttttagcagctggcttgcaagcagttctaaaataaaaaattttaaataatacttgaagggcggacatttttatagtgtttgtccttttttcgacttctaaaaaaatttgcgccttttttgcgtaataaataatagagggttaaacatcctcaaaaatattttttaggaggactttgcatgagcaaagataaaaaactaaacgtcgcggaagtactgggctttactgatgatctgatgtttcagaacgtcatgaaagatccagagatttgtcgcatgttcttgaatgaggtgctgccacacttggacgttaaggacttaaccgtccgcacgcaggaaaggatcgcattcaatggctggggaaggtttcgattcttgatgttttgatcaccgatagccggggcaggcgctacaacgttgagatgcaggttgccaacaaaagagacatggataagcgcgccagacagtatctatttaagctaatggaggacggctttttgcggcgaagacaagaatatgaagaattgcatgcggcttatgtgatctttatcttgccgtttgacccaaaaggaaaaggcttgaagcggtatagttttgtttatactgccaaagaagacccatcagttgaactaaatgatggatctgagataatatacttaaacaccaagggagccaaaggtaaagtgaaaccaggtcttgacgatctttatcgcttgattgaaggcaagccaacttcaaatggtaagttcattagccgagttaaggagacaatgaataattatcgcagaaccgaagaatggaggaaacacgtcatgaacacggaagaagtcgcagaagcagcaaagcagctcggaatggaagaaggcaagaaagaaggcctgatcaccggagtgcaaaacttgatttctgttttgcgtgattatggtgaagacaatcaaaatattttacaacagcttaagcaaaagtatggcaatactttctccgataagcagttagaggatttcttgaagcaaagctaatcttctaataaaccaaaatagcgatagtaccaacgattgcggtactatcgcttttttgaaattaaaaaccttttaaaatggagagacattttgcttgaattttgtttggcataaaatcctcacgaatccctaaagtagagtagcaataaatctgctggctgggtattaatggaatagattttactccgggatagtttttggcagctatatccattaagaaaccaacacccatattttgtttgattagttgcaaagtagcatcgatactatcaacaactagttttttctttggtttaaaatttgtgttagtaaaaatttgttccagggcagttctagatagaaaacgtttatgtctcataattaaaggaatatctgcaatttgaaatagatcaatttctttttgctttgcgagcggattattgctgggaacaacgagattgtattggaaggtttcaagtgtggttaatttaattccagggagtttttcattgtcaagacgagaaaaaacaatggcatcatatcttccttcacgaagatgttgttctaaataatgagaattttcttcatgcgtttcaactgaagctagcaaatgtccttggttaagttgagtgatgacggaagctagccattctttaccagctaactcagaatagcctaaacgaaaactgttttcgtttgctcttttggcttctaaaataattgatcgttctttctgaattagcccttttgcgttacggtatacaactaagccagcgggtgatatagtcattcttttgtgattgtgggcctgaaaaattagttgggtaccaatttctttttcaagtcgcttaaccattgaagaaatagctggttgagttactccgaaaaattcagctgttctattatagtttttagtttctacaagtttttgaaaatactttaaatctctgaattccatttttaaataaatatctattattggatatataaattaaccgttcacaaatacattatagattatagcattaactaaactccataaatataatttatcgaaatatatatatcgcttatcatcaattcacaaaaatataaatttgattattttagattacttttcacatgtctaaagctctatgaattaagacaaaaaggttattttgtgaaaaagcgcttacaaaataatgcttgcactttagtttttcacatgatatttaatacacgacaagttgatttttatgggagatcaaaaaatgaaaaatgtaaaaaatattaagtggaatgcaagttatgatgtattggttttaggctttggcggagcaggcggtactgctgctagatttgcagcagacaataatgctcatgttctgttagttgatgtagctccttatggacatgagggtggtaatactagatattctgctcaacatgtagccatggctcatgatcgtgaaaagattggtaagtactttgatcaattggcagaaccatattcatattcaaagaagaccatggatgtttatctagacggttttgtaaatatgcccgaatactttgaaaaatattttggtattaagccatttatttggggtgatgacttccgagaaggtgatgccctagatcacaaggatcacttatgtgaatacccagaatttgaaggttcagatacttttgactttgctttagtgcataaccgcgactttgacgctggtctatggaaaaagattcgtaaggaagtagcagatcgtaaagataaaatcgatgtatggcttaattctcgcgctttagaactgattcaagacccagagactgatcaagttgtaggtgcaatagttgaacgtaatcataagagatactttatccatgctaaaaacggtgtagttgtttcaactggtggttttgaaaataatccacaaatgcaacaagattacttacatattcacaagttgaccccacttggtactttatataaccgtggcgatggtgtaaagatggtccaaagcgttggtgcaaagatgtggcatatgagcaactacgaatcacttggaattatcccaagctacgtgatcgctgaagaagagggcactcgtggtcgtcagatcgggggctggaagaatgttaagtctggttcagttattgctgttgctaatgatggttcaagatttatgaaagaagatgctaagttccgtcacggtcacatttatgatcatggcgaatacaacatgcctcatgcttttgacaatgcatggttagtctttgaccaaaaacaataccaaaaatttgttgaagaaaaagaaagcggtaagcttcgttacaacaagttatttgataagatgattaatgctactagcgtttctgaattagctgataagatgaatgttccggctaaaaacttgactgctacaataaaccaattcaatgaatttgctaaaaatggtaaggatcttgaatttggtcgtgccacagactcgatggatgaaatcagtactaacaaactttatgctctcaaattagctccagccgttttgaacactcagggtggtgcagaacataacgaaaaagctgaaatattgaataacaatgatcaaccaattcctcacctatacagtgctggtgaaatgggcggtatgtgtgtcaatcgttatcaaggtggcggtaatctcgctgaatgcttgattttcggtaagattgctggtgagcaagcagctaagatgaagtcggatacacaagaagttaaactagaaaatgctgtgccatcggttaatgatttaatagctggggataaaattgacaatatagaactaggtccagatcaatatgttggttctaccgaggctggtattggtggtcgaattgtggttagagttacttacaaagataaaaagattaagaatgttgaagtgcttgaaaatcatgaaactgagggaattggagcagtagctattcaaaaattacctgatgaaattgttaaggctaatagtacggaaattgatgcagtctcaggtgcttcaacgactactagagcagttgaagaggcggttaataaagcaattaagaaggccaaatagctaattttcacgaaaatgtcttagaatatcaataccttttttctgatagtcatttggaataaagctcttccgcatagcaatttgcatataagcccataacctttgatctggtatcaagtgaataatatgcaaatctcttctatctttaagtgtatcttccattgctaaagcaatacctacattttgactaactaagtcgatcattagttgcatagttctagctgtaaaaattatttttggagaaaaattacctaattttgcttcttgatctaagcattctctggtcagatatccttctgaacgcgcaataaagtcacgctgtgacagctcagaaattttaacttgctctttattagcccaaggatcattaagactagttattatgaccaattctgttttatttaaattgcgaatatagtaattagggtcgttaataggcaccatccaagaatagatagctacatcaatatctccattggttagactttcgaatatatctgctgatcgctctagatgcgtgtcaagcattgacattatgttagcctgatgaaattgagcgataacctcaggaatatacatgctaccagcaacaccagaaaaagagattcgtattttcttctcactggcatgcattacatcataattaacgctattaatttcatgtagaagcttaactgatttattgtaaagcaagtctccagcagttgttgtgttgagtttgccttttcggttaacctgttcaactaaaggatctttaaaatgcttagctagacgtttaacagctgctgagatcgttggttgagtaacgttaaaaaatgtagctgttttagtgtaactaccagtttctattaatttgcaaaaatacattaagtcttgattattcatcataaactccatttataaatatattttatatattgatcttttttgattataagttatgaacttcacaatcattataaaacttattatattgagatttaaagcaaaaaaataaatcattttattcacaaattcaaattagcatttaacgaaataatgttataaattgtaatcatcaacaaaagataagcgcttacaaagtttgattaataatttagggagtagaaaaatgttagataaatttcaatggaagaaatggattcttcctttagtaattggaattgtactgtggcttgtaacaccatttaagccaacagatattagtgtgccagcttggcatttatttgcaatctttgttgcaactattgcagcatgtattactaagccattaccaatgatggctaccactttaattgcagttgtgatagcaaccttaaccggtatatttaacatgaaagaagtggcggctggatttggtaattcaacctcttggatggttgctatgtgtatgtttttagcagctggatttattaaatcaggtttaggtaaaagaattgcatatatttttgttagaacttttggcaaaagcactttaggcttagcttatgctttatcatttgtagaaactgttttggcaataggtattccaagcaacaatgcacgtgttaatgggatcatgtatccaattatcgatggtctttctcgtgaaatgggttctgatcctgaaaagggaacacagagaaaattaggttctttcttagtgtttaatgaatatgaaatcaacaatgttacttccggtatgtttttaacaggtttggcaggtaacatggtagcgttaggtttggcaaaaacacaaggaattgaaatttcttggatggaatggttcctagctgctattgtccctggactgatttctttatttgttgtgccatttttattgtataaagtttatccaccagaagtaaaagagactccaaatgctcatgcttgggcagataaaaagttaacagaactaggtaaaatgacggctgctgaaaaaattatgtcagtggtctttgtagtagctattttgctctggttagtgggtccacatattggaattgatgcgactgaaactagttttattgctgtagcattacttttaattactggagtaattaataccaaagatattctaaatgaaagttttgcttggaatattttaacttggctttcagttattatgctaatgtcacaaaaattaatgactttaggctttttcccatggttctcaaaaacattgggtgcaggacttaagggcatgaattgggtattagttttagtagttttgtggttagtttacttctacttacactacttgttcccaagtgtatcaactcagatttcagctttgtatgctggttttttatcaattgctctaggtgcgggagtgccaaaaattatggcagcactaatgctagcaatgtgtggtacagtatatctttcaacttctacatattctgcgggccctgctgcaatggtttcttcaacaggatatatttctaataaggacttctggaagttaagtgcaattattggtgtggtattcaacattatctggcttggtggcggattgctttggactaaagttattggatactggtaaaaataggtgaataaaatgatatataattcttcgttaaaatgggacaaagtctatgatgtaattgttgtgggttttggtggtgccggtgcaggagccgcaagatttgcagcagataacggtgctcatgttttactagtggattcggctccagaaggtagcgaaggtggtaataccagatatgctggtggtgcttttgcctggggcagtaattttgatgatctaaaagattactacaaacaaacttattatccatttaaatacgatgaaaaagatttagatgcttttgttgagaatgttcttaagatgaaagaatattctaaaaagtattttggtattgaggcaaaagctacaggaagaagacctaagggtgaatatcctgaatatcggcatggggatgcaatgcaatcgcaaagtatgacccaagggatgtataatggcggtttctggaagctgctatgtaagaaagtttatgaaagattagatagaattgatatttggtttgattctcctgtagagcatttgattcagtcgccaaaaaatcagactattatgggcgtagtaattaatcgtaatggcaataaaagactggttgctgctaaaaatggtgtagttctaagctgcggtggttttgaaaataatcaagcgatggttcaagactttttaggtcaaggatctttggctccaataggctctttatataatcaaggcaaaggaattgatttagctgtcgaagcaggagcacgattatggcatatgtctaactatgattcgcacggtttatcattaagacagaatgacccacgtgaaaagtttgcctatatgattaattggaaatcattgtttaatggctcaatttttgtggcgggtgatgatggtacacgttatttccgtgaagatgaggaagatcgtcatggttataaatataatcatggcaattggataatgattcctaaccaaaatcatcctcatattgtaatggatcaaagacaatatgagcaattgagtaacgatacttctgcgaaggcaagtcaaataaaagaattaatttcttacgcaattaaagcaaatacgattgaagaacttgctgaaaatatatccgctcctagattaaagcaagaagttgcagactttaatttcttaactgatgtaaaaaagcgagatatgtttcttcatcgaaaaattgatactatgcgtagttttggaaaaggaccatattatgcaattcctgtaagacataatattcttcatactcatggtggagctaaaagaaatgaaaattgtgaagtaattgatttaaatggcaaagttatccctcatttatatgaggctggtgaattaggtgatatttttgctactaaatatatcggtgctaatagtattgctgacttattgatttcgggaaagatagctggcgagaatgctgctaagcccaaggatcaagaggttgaattagatgcagttactggtgcctctaaagttgctgatttgaaatccgatgctcatactatgatagccaattttgatgctggtaaaaatcagggtataggtatcagttcaaatggaataagtgatttaccgattgtagttagagtaacacttaatgataaaaatcaacttaaaaagattgaaactctacaacagaaagaatcaccatcattaggaggaaaagcaattccagttttaaccaaagcaatgattgctaacaatactactgatgtagatactgtgtccggtgcttctgttactagtcatgcctttcaagaagccgtatctgatgctttgaaacatattcaaaaataaaagttaataaaccaaaaagagcgatagtaccaatgatatagtcctactttagtagacagtacaaatatataaaattgtactatctatgaaagcaggactttttctacgtaaagtcaagcgcaataaggtgtttggctttattttttacctaaattttgtcatgagtatcttttagtggcgatttatttttttagaaagcatactaaataagcccacctctatatttaatttatgggcttagcgttataatgtacttgatcaattaattacgactaaagtctttttggttatgtgtggctacgttgtaatcatatagttgatcattgataatcagagcataaatggttctgattagtttatgaattgaagcaatagctatctttttgaaccctttggtttgagaggatagctttttgctttcataataatctgctatatgacacggatttgtcttagctgcattatcaatttgtccaatagctcgataaagcaacttacgtgcgactgcattgccatgtttagtaatacttaaattagagtccatttctcctgactgatatctgcctggatcaattccgataaaagcattgattttattaggattactaaatctgcgtaaatctcctaactctgctaaaactctgacagcagtggtctgtgcaaagcctggaatgctttctaggttttctaaatcatgattgggaaaagacttcgctaacttaaccattcttgcgattaaattttctctttgatcacttaaattaagcaatctgtgtgcataatactgcacttgctcgacttctatgctagagcaagatacaactggataagcttgataagctaattcaattaatttatctgcagtccttagagcgtgtttaaaagcaatcccctttaagctcattaaccagttaataagctgttttttatcttctcttcttactaagtcacaatgaggatatcgcacaactatttgccagtaatttttacctttagcagaagaaaatagattttcaatttcaggaaaagtcgattgtagagcttggtgaagtcgatttttagctattaccaagtcacttgtcagctggtcatagaagcggctcaaagcattaagctgcttataagtttgggattcgctttgattaaccggatggcgataaagtctttgaattaaggctaaatgataagcatcagttttatcggtcttgttgtagcgtagccccatattcatagccgtagtcttcaagaaaagcctgcagtctgcgtgaataaacgccggtagcttcaaaaataatttgcggatgtttagaaaaagcggttaattcatgaagcaattgaataaaaccaggacgattattagtaatggttagttcatttttgctttcaccaattagttcacaaacagtagaagtagacttgcttacatcaattccaaaagtaacttgcataataaaaacctccaaaacttagtagtaaaacgtatttacttaagaaatcagatctaattttctaaactcgacatctagtgtccacattcttcgaagagactattgaaaacttaagtaaaactgccagttttgtatacgacatcaagtgtctaaagacctcagggcatatcgttttactactactttaattctacaaaagaataaaaatagtgaatcaattatcccgtcggataactaattcactatttagcttagaatgtttactatgtctaaatttaataaagaacaaaaaatagaaatttatcataaatggaaagatgaaaatatctcaatcagtcaattggctaaagcgtacagaatgaatctagctaatttagactatatgcttagattaattgatatgcatggaatagaaattttaactactaaaaaccaaagctattccaaagagtttaagcagcgaactattgaacaagcaatctttggcaataaaccatacttacagctgtctttggaactggggtttaaaagtattggcatgcttaacaattggattagagaatataagaaaaacgggtataatgtcattatcaaacagaaaggacgccctgcccgtgaccaaagaaaagcagaaatctcgcaaggaactggagaaagagatccagcagctgaaagaagaaaacttgcgattgcgtattgtgaacgaatacgtaaaaaaactaagtgccttggaccaagaagatcagaagaaatagctagggtgattacggatctaaggcaagaattcaaagttagtttaaattatgtattagctgcgattgcagagcaccctgagctacctataattgccagaagctcatactacaagattatcaaacgacagcccgtcaagcctaaacggtcaaagcttattgctagaatccatgagatttttaatcatcatcaaggccgctatggatatcgcagagtagctttgcagttaatcagagagggctggaaagttacggagaaaaccgttcgctattggatgcataaattaggtcttaaaggcatcaggcgcaataagcgcaaatattcaagctataaaggtactattggcaaaatagctccaaatttaattcatcgtgatttcttcgcagccctgcctaacacaaaatggtatactgatatcactgaatttcatcttaataatgaaaagctttacttattgcctattctagacggctgcggtggcgatatagtttcttatactatctccaaacatccagatatggatttagtaatgacaatgcttgacaaggcttttgccaaagaaacagctcttaataactgcatttttcatactgatcagggctgtcagtatcaaagccctcgttatcagcgagctttaaaactccatggtattactcaaagcatgtccagaaagagcaactccatggatgatgggctaatggagaacttctttggcctgctcaaaactgaaatgttctatgatcaagaatacaagtatcataatcttcaagaattaactcaagcaatcgaggaatatatcgaatactataacaacgaaaggataaagagcagattaaaaggcttaaccccgaaagagtatcgaagtcaagcctctattaatccaatattttaattgtctactttttacgtctcagtacatttttacattaattactattatttttcttcttaattagttaatttaaaaagttctggtcaaaacctgacacctttgacacttttcctctcaacaccttgatactactagctttatccatcatatctccattgacaccaaaacaattcaaaagctacccaatgcttgatataacaataatctgctagtgtcaacttaaccaacaccagaccgacaccatttgagttaataactgacacttttcaaatttcaagattcggtgtcaacaacggtgtcgcacatcgactaaaatgtgtcagctaaaccgacaccaaattttaacttggctatgtagattctcaaccattcgcactatattaaatgcaagcctgttcaaaaacttttagctttttgaatgaacgtgctgggcctacaacatcaagcttaaatgatgttcagaaacttatggtcaaaaaggatggattgaaatgacggaatatggctatgctagggtgtctacaaagggacaagaactagcagatcaaattaatcaattgcaaactgctgggatcagtgaggattgcattttctccgaaaaatttactggaactacaactgaccgaccacaatttgctaaactaactcaattggcgaaaccgggtgatgtgattacggttaccaagctggatcggttagctagaaatacccgggaagcattaaatgttattgacccactaatgaatcaaggagtgaagatcaatgtacttaacattggcatgttggaaaactcaactgtgggtaaattagttaaaacaattctcttagcagtggcggaaatggaacgggatatgattgtggaccgcacccaataagggaaacgttatgctaagttacaccggtctgattatcatgaaggacgaccccaaagagccattaccccgcactaccaagccgcttatgagtacttgcttactcattcctacaaacagactgcgagtgcttttgatatttcgatttcaactttgcaacggatccgaaagcaggtggagcaaaataatatagcttagttttaaaaaagtatatattattttgcgctggaggatttgaaaaatggtaaaatgttataccccatttatttactggattgatactaccggtctagactggcaaagcgatgaaatcattcacctaaccataacggatttatttggtaacattgtgttctcacatctgtttaaaccagtgaaaattgaaagttgggacccaactcagcagggtttccacacaaaagcacttgcccccccacatattcaatatataataaattacgcgtggtgctagttaagtcgttttagttaataaaaaagtccaatcggattagactcaagttgtaacttaaattaaatagaaaagagtctgatctaattgaactatctcaagcttaatcgtttttctcaccatttacaagttagctttgctcggctaaatgtaatttgtcgttctttgtacaagctttgtgctcctgatgagctgaaataccgtaaaaatattgatcaggttaagctcttagacagttctattttagcaatgcttatttggcaaactgaaattggtatcgaatctcaaagaagattttgtaaattctttgtcggtttgtctcattctcgctttaatcgtcgggcacgaatgcttttgcctttaatgcgctgtatccgtcaagattggaatcaagaagtaaaaacagctggagaattcttaattattgacagcttcccagttccagtttgtcagcccatccgcaactatcgcgtcaagatctttcgtggcatatctgatatcggatataaagccactaagaaaatctattattacggcttcaaggttcacgcgatagtaagtgatgacggctatgtgctttggacaccatatcgaagaaacatgaaaggcgctaaaaagcataacgatcatcaactgatggcaattagaagaacaattgagagcgacttttctttgcttagctactataacgctgaaaataactgggcaaggagcttagctggttttcagcagcggctagaaatagccattttggcttataatatagcatattgcctagaacgatttaactagcaccacgcgtaataaattgcgtcttagaaagaggatataaaatatggacaaattacataagcaacaagtagcaaaacgacaacgatttgccattaagaaattaacagttggaacggcatctgtccttgttggcttaaccttcattattagtggtaatgccaaggcagatacgacagttgctgctcaaaatacattcacgactcaagtgactgatccacaagttagtgcccattcaagcaatattcggattagcgacgaatcaaatacggttgttcatcaaacttcatcaacattagttccaaataaaacaacaacgccagcgcaacaaatgccgataatccataaaacacagcaaaacaaccactgcccagtaagtacaacaaacacagcaaaacaaccactgcccagtaagtacaacattactatgaattttcgcgatgtcaccctacataagccaattcaagtgattagtaatggtcattatgtattcaaacaacctttcaagcagaccacaattcgaccaggggatagtgtggatcaagaatttactgtggccggttataaattaatgaattcagaagttttgaataagtatttctattttgataaacaaggtaatgcctgccttaagaaaggtattactacgcaagacattaacattaatttagattacgcatcattgtcaccaatcaaagtagagtatgttgatgtagataacgggcatattttagcatcaatcgttctagatagtttctggatggcccctgaatctccacaacaccgtgctggtgataagaaagcaccggatgcatcacgctatgaagccgcagccattaatattcctggatataaattagtttctgaacctgttttaaagggtaaaatcactggtcaaactcgaaattcgttagctgatcctaactatgtttatttaactttcaagtataagaaggttttgaaaaataattctgatagtaataggactgaattgttacttgttccagaagaagcaaatctaccgaacaaactctttacgattgctggtagctatggcgaaaggattgacctaaacaatggtaattatgaaaaaaaaatgagtgaggagattagccattacgaaaaacaaggttactcctatataggaagtacagggacatatcttaattctgattatttcaattggtacgctaaggggatacatgtttacttgctaccaaacaaaccagtaactgtgcgttatattgatgagcaaggaaatatgcttaggaataatgatacgcttgcgttcaacctagataatcccaaccaaaaaaataatggggttaatccgcaaaaaggctggtatgcaaatggttcatggcaagtccaacctaagaaaattaaaggttatcgtcttgttcgtactcttggagtaacgagtggccagtatactgtataccaatacaccacaacttttgtttacactaaggacacagatccaactgatcccaaaacgccagagacaacaacaacaacaactgatccaaagacaccaagcgataagcttccggacaatcctggcaagtctggtcagacagttccagttaatattcacattcctgatggttatcaattagttcctggtgaaagtgttccaacattttacaccttcaaggatggtaaccctaatcaaatcattagttgttggttgatcccaactaatggcggtcaaccaacaactaatgatcatcaaggacaaggaacaccagctactaatacgcctacaaacactactcctaatggaaatgctgttactggcaaactagaaggtaatgttcctaacatgcaaactgggaagacgattacgtttcaaccaacgacagctaaggataaccaactaccacaaactggtaatgacaatagcttaacaaccgttgccgggattattgtaagcctgttaaccagttgcttagctgttcttggcattaataaacatcaaggctaatatgattacctaccaaccattccgaagctaatcaagacgcgatgctttaattagcttcggaattttgaatgatatatcattataataggatggaataaactttatataaatataagtaatggggattgatttctaatcttttaagaatactgtttatggttgattttttatacaatgtttccaactgagagtaaatataaaaagggagatactatgttatcagcaaagaattattacggccgtctggtaaagttaaaaccaaaacaagatcatttttcacttcgtaagttatctattggtcttatttctgttaccataggtattaccttatacttgggagtggacaactcctatgttatggctgatacgaatttgagggataataacaatcaacaattagccggatcgggtaatggcaccaatataataaatgataaagttaaaattccaaccggtgcttttcagtctaaacaaatgcaaactgaaaattgcaaagtaaataatcagatgttggataaaactgaagtaacaaattctactaaaaattcttctacactaaatgtggaaaattccaagactgctgatttgtcgagatttgattactctttatatacaaaaaaagtaaagagttttgaatttagaaattcagataataacgatgtaattagaacagtaatattaaacaaacctaccggtgttgaaactgtaactatgactttgaatgttagctgcttaaaagggagaaagcatcagcatcgatcgcacacatctactagatcgagtatttataattataaacctcaagttattgctgaagtaaatacatccaataatccattgccaaaaatatcaattttggagaaaaacgttttaccaaaaactttttttcaagtagataagaatacatttcttactcaacaggataaagagaactatgagaaatttatatcagttaataagaatgatattagcatagaattaccagctttttccattaatgatattgatattccaggctattcttatcatattaatgcaaaaaagactactcctggagcaggattaggtaaagaaaagttttacatctacactgaatcaccacaaacagttgttatcgactataccccgattacggttaaggttgaacataagatcatcacggtaacaccaaccgatccgaagacaccaagcgataagcttccagacaatcctggcaagaactatccaaagggtgttgataagaaagatctgaacaagactgttaagcggacgattactgttaataaaccagctggctcaactgttgatgctagtcaagagactactctaactcggacggctactgttgacgaggttacaggccaagttacgtatggcaaatggacaacctcaaagcttgataagtataatgcaccagaaattccaggttacactccaagtcaagcagaagtccctgcagttgatcaggtaacggttgattacacagatccaaaaattgaaattacctacacgccaaccgaacagactgggaagatcacatacgttgatccaaacggcaaagaagttggtactaccccattaacaggaaagacggatgaagagattccagttacaccaaacgttcctgcaggttggcagattgttcctgatccaaagattccaacaaagatcaccgctactccagacggcattcaaacagttacggttaaggttgaacataagatcatcacggtaacaccaaccgatccgaagacaccaagcgataagcttccagacaatcctggcaagaactatccaaagggtgttgataagaaagatctgaacaagactgttaagcggacgattacgtctcaaccaacgacagctaaggataaccaactaccacaaactggtaatgacaatagcttaacattaatgggcttaggtgcctccaccttattgggaatgtttggccttgctgctgtaaacaagaagcgtaagtaatcaaattagctctacaattttatccctttgtcagtactgatgaggtattttgatgaggttagtttaagtagcgaagctgcttgagctgaccttttcttttagcttagtttttaccatgagatttgagagctagtagacttcggatacgggaatgatcaaagttgcgaaaaccataagctgttattctagtggtcttaattttattattgtaagcagtcgttatcaatacgggttgaacaaagggactctacaattgtaagtactgatgaatttaacatcagtgcttattttggttttctacgaatagtcaaggatattaaaggaattccttggaatttagctggatagaaaagttaattaaataattaaaatggctcaaagttaaatttaaagtataacaaaacaagctcatgaactagatttattgaacctgtcaaatcttttgtgtaaatagttctttctcgtaaattgatttttgaattatttattcaaaataagattctaaggtatcctgaacctgaccaaagcctttatgaattcggttgaaatagcggtcattgtagctcattgcctggatgccaataaatgcatcaagcgactgttcagttggaaattctgccttaggcttagctttacgcttgatgacgttgttaaaggattcaatcatattggttgaataaattgaagctctgatttgtttgggataattgtagaagaccagcagatcgggctcaatttccttcaaacctttgatgacattgctataagctttattccatctggcatagaatttgtgcaagacagctgcagcttctttttggcttgtctgttgatgtatctgcttgaattcgttcatgatcttttcgcggtcatccacccggactttagcacagatattgcgcatgacatgaaccaggcagcgttgaaaatgagctttaggataagtcctggccaaggctgttttcatgccaacaacaccatcagaaagaaagagttcaacttgcttcaagcctctggacttcatgttttgaagcatctctgtccagacttcaatgttctcactaggagcaatgcagtagtcaatgacttccttatgtccattaggtttaatgccaatggcaatatatactgcttcacgctcaaacgtttctcggcgcaaaggaaggtatgtcgcatccaaatagacacagaaaaacttgtcgcttagcttgcgcttgtgataagcctcaaccttggggagcatctgcttggaaatatttgatacttgagctggactataatgactgccatacattttctcaatcaagtcagcgatttctctggtagttacgcctttggagtagagcttgataatcgtgctttccaaaacatcagagtgctgcttgtagtcaggcagcgtgtgctgatgaaactgaccgttgcggtctcgaggcacttgcacttcaattggtccaaactgggtatcaaccttgcggaaataagcaccatttctagaattgccagtattccagccatttctggcatagggatcatagcctagaaaggcagtcaactcagcttctagcaagttattaacagcctgttgtagctctttgcgcaataaatcatttattttgtctggattgaatagagcttgagcaaaatctttggtaaaatcattcatgaaggagttcttctttctgtatgtgtttttttgttcaaaccaatcatacgagaaaggaactcctttttctaatgtttaaagaaataaatttaaggaatcattcatccttacacaaactattttacagtctctccaaagagtttaagcagcgaactattgaacaagcaatctttggcaataaaccatacttacagctgtctttggaactggggtttaaaagtattggcatgcttaacaattggattagagaatataagaaaaacgggtataatgtcattatcaaacagaaaggacgccctgcccgtgaccaaagaaaagcagaaatctcgcaaggaactggagaaagagatccagcagctgaaagaagaaaacttgcgattgcgtattgtgaacgaatacgtaaaaaaactaagtgccttggaccaagaagatcagaagaaatagctagggtgattacggatctaaggcaagaattcaaagttagtttaaattatgtattagctgcgattgcagagcaccctgagctacctataattgccagaagctcatactacaagattatcaaacgacagcccgtcaagcctaaacggtcaaagcttattgctagaatccatgagatttttaatcatcatcaaggccgctatggatatcgcagagtagctttgcagttaatcagagagggctggaaagttacggagaaaaccgttcgctattggatgcataaattaggtcttaaaggcatcaggtgcaataagcgcaaatattcaagctataaaggtactattggcaaaatagctccaaatttaattcatcgtgatttcttcgcagccctgcctaacacaaaatggtatactgatatcactgaatttcatcttaataatgaaaagctttatttatcgcctattctagacggctgcggtggcgatatagtttcttatactatctccaaacatccagatatggatttagtaatgacaatgcttgacaaggcttttgccaaagaaacagctcttaataactgcatttttgatactgatcagggctgtcagtatcaaagccctcgttatcagcgagctttaaaactccatggatgatgggctaatggagaacttctttggcctgctcaaaactgaaatgttctatgatcaagaatacaagtatcataatcttcaagaattaactcaagcaatcgaggaatatatcgaatactataacaacgaaaggataaagagcagattaaaaggcttaaccccgaaagagtatcgaagtcaagcctctattaatccaatattttaattgtctactttttacgtctcagtacagtgctttcgaggcttttcttttatattattttttcttagaaatagggtcacggatatttaattgactatggcaagtgatcgtaagtggaatttgaatatcttccgtaattagatctttagccaaacgaacggcagtcttgcccatttcttcagtattcatatagacactggatagggtaggagttaagaagcgattgatatctacatcatcaaaactaacaacagagatatcgtcagggatgttaacacctgcatcactaaaggctttataaacacctaatgccataggatcactaccgacaacaacagcagtaggacgttgttgcagttttaagatctcttttccagcttcaaaagcagagttagttgaccaatcagtaataaaagaatggcagtactggtcaagattgtggagtttcatccaggacaagtaagtgagttcacgtagatcatttttttcacaagcaatcttaccgtcaagatcaagaaccaatgattttccaccgatgtaaacaatgttcttgtgtcccaggttatagagggtatcaagaatatgagaagtttcttccacaaaatcattacgaacgatattacaattatgaatattggtgttgacgtcgataaaaattatatggggattaatgctttgaatctgcttaattgctacaggtgtcatttcaccctcgattagcactgcgccaaatttagctaagtcagcccaatttttattatcatcttctattctaaaaggttgctcaatacgtaaatgccatttcttggcttcttcattaatgcctttatgcagattgagaaaatagggatcggtgatttcacgagatttgttataacgcatgattagtgcaatcgagagctggttatcagtttgcttgggaccaggatgtttttgagatttcgaataatgcaggcgtttggcggtttcgataacgcgggcacgactagcctcattgattctaaaagttggatcattgtttaaaattcgtgatacgctagctggcgataccccagcaatacgtgcaatgtctctaatacttgccataaagatgctccttgtttgtttactgtttacattatacaacttttagcaagaaactggtgtataccgaacttgaggataatagtttagtgtccataaagtaagtcatattgaatcaatgtgacttactttatggacactaaatttatttattttactacactacatagtaaagtgtagtaaaataagtaaaaacgcaattgaaaaagaagaatatggaaataataaaatcttaataatttgttcgcttgtttttatatttgtaattcattaaacttatgttcgaaataatgaaaggaaaaatatatttttcaattgtaggtaatataattccatattcgtatattgacagtacttatgaaacaaaaatcattgattagtcaactagcaaaaatacataacggtacaattactcatcgtgaattagcattaaatggagtatcaagttatagtatttcgaaagctgttcaggatggtacgttagaaaaaatacgtccgggaatttatttatttggtgatgataccgaggatatattttatagtttgcaacaaaaatataaaaaaggaatctattctttagaaacagcattatatttatgggggttaagtgatcaatatccttttagcttagatatgacttttcctaggggctacaataatccaactttggatattgaaataaatccacatattcaaactaaaagtttggctactcagggaataactcaaactgaatcattcaatggaaatatgattaatctctatactcctgaaagaactctagctgaaatattgcgaccgattaatgctgtagatatcgaaataattaccaatgccttcaagatgtggaataaggaaaagaaaaaagacataaatacattaatgtcttttgcagaaaagtttagggtaactagaaaggtaaatagctacttagaggtgttgttgtgaaaaattatgttgatgagaagcagttcaaagcagatgtaagaaggtatgctagagagcataatataaaaggaaatgagattggtcgattatggcaagaaattatgttagatgatttgctagaaagaatttcagtatcaaaatatcgagataatttcattttaaaaggtggttttttgttgtcggctattgttggtatcgataaaagatccacggaagacattgatgctgagataaaaggattagatttgaccgaaaaacaaatagctaaagtatctgaagaaatctgtcaaataaaattagcgggggatctattaagcatttcgttgtcagaaattgaacagattcatgagcatgaagagtacaagggctatcgattacattttaatgcttcttttcggaagataagatatccattaaaagtagatgtttcaacaggggatgttattacacctagggagattgaatatagctataaattacatttagaagatcgacatattaatatttgggcatatactatggaaactatagtagcggaaaaattagaaacggtaattacgagaggaatagctaatacacgtatgaaagatctctatgatttattcatactgcagagagaacgaatcaatttagctactttaaagtcagcttttgctaatactacgaattaccgtgaatcaatcttttggacaggacaagatatggattataagtattgtctaagacaagtagatattattgctgaaaatagtaatatgcagaatctttggaatagatacgtgagaaaacatccttttgctaagggaatcacttttactcaagttattcaggcagttcaaacttggctaactaaattagagtttgaaaaataatttcaatcaaaaatgacgctaattgatcgaaccagcgtcatttttttagataatagatgtagaaaatagtttgaaaaacgattagtttttatagaaatctttattatactttacttgtcttcgtagccctttgggtgactcttgtgccagttccaagcagttgcgataacgtcatcaacactttcatgctttggcttccagcccaaaatagttcttgctttggttgaatcagcaaccaaagagtcagggtcaccgccacgacgtggacccattgtgtaaggaatatcaatccctgttacttttttagcagcgttcaaaatttcaaggttggagtaaccttgagcagtacccaagttaaagacatctgacttattagtctccatcatatgtttcagtgccaaaatatgagcatcaattaaatcttcaacttgaacgtagtcacgaacgttggtaccgtccttagtgtcatagtcatcaccaaagatagtaaacttaccatccccagaaattgcactcttcaaaatatttggaatcaagtgtgtttctggtgcgtgatcttcacctattgtgccatcacttgcagcaccagcaacgttgaagtagcgaagagcagtgcacttaataccatcagctttgtcagcccaagccatgatcttttccatcatcatcttggtttcaccatatgggttgattggatcaagtggggtgtcttcggtgattggcaatttcttaggaataccataagttgcagcacttgaagagaagactaagtatttaacaccagcgtcattcatagcttgtaataatgaaatcatgccagtaacgttattgtcatagtacttaagtggctttttaactgactctggaactaatgaatatgctgcaaagtgcattacagcatcaatcttttcatcacgtaaaattttgcttaccaaaaaagtatcttcaatatcgccttggtaaaacttagccttaggatctacagcctttctgtgaccagtatataaagcatctaagacaacaacatcattgccttctttaactaattcgcgtacagcgtgtgagccgatataacccgcaccaccgacaactaaaactttcatgttttgcgctcctttattttagttattatcttttattgaaatcgattacattataacacatattttagtaaataatttacttattttagataaattatttaaaaacactaatttagtctaaatgaaaattcatgatcttgacttgggtcgatttgatattgatcttcaacatctgtaccccagctatcgatgccacctacaccgcgaacggcacctgcgattactaaaactgttctccgggcaagaggcaattcttcaatatgcgttgcattttctagttcttctgctgtgtagggaaggcaactgaagttgaatggcttatcagtttgctcaacggtgaggtcaaaatcctcattagaatgatcagcattgttgagcgtagtatttctagtgattttgagtttatgcgtttgcatgtgcatcccattttcctgtggcactaggtatttggttactggcaatcccttaattttaaaagagccagcactggctccagccatccgatcaggataagtctcaccagataagccttcatattcaaagccactagctagagttggtatgataaagcgcattccaattactggaagcggtggtaaatcttttttaccaaaataacgcatcttaattgtaacatgaccattattgttaatttggtaagtaatttcaacttttgtttttggaatagttaaagtttcataaataaaagtaatttcgactttacttgcgtactcatgattagaaaattggttgttgagcggagcgattggcaaatctgcaaaatcatgttgatcaactttgagctgaatttcagtacagtggctaaacatatcggcgccgagccattgagctgcttttaagttgaaaccgttgccgcgatcgttatcagtagttgcacgccaaaaggttggggtaggaacgcgataaaaccattctttacccttaatttttaaagactctaagccacctttttcatagctgaaaatatattgcttatctggggtattaatgcctaaagtagcatccccatagattatatgtaaattatttgtgtaagccatagtagtatttaacctcctgcattgctggttttggtgtacgatcggcgaacattaagccatcgcctgaaaattcataatcagagtgtcggtcgtcaaagtcgccgccataccgtaatacttcttggccactcaccggatcgtgtactaatagcgcttggtcgatgaagtcccaaataaagccgcctaaatattgtgggtattggtcaagcaatttaatgtaggaatccatgccaccatcagaattacccatatcatgcatatattcgcattctaaaaatggcttttgaggcttatttttaagatattcttcaacatcttttggtggtaaatacatccagctttcaagatcagaaatcttgtcctttaattctggcgtatgaaccacgccttcatagtgggtcaggcgactatgatcgtgtgctttataaaatttattcatagccgcaatgttttctccggcatatgattcattgccaagagaccagaagagaatggcggtatggttttttaaagtttcataattgttgcgggcacggtcaattacagcttcacgccattcaggaatagaaccgggaacattatctgaaggttcaacttgtcccatcttttgccaagtaccatgtgattcgagattattttcagccatgacatagattccattttgatcgcagagatagtaccacggaatctgattaggataatggcaagttctaaccgcattgatgttattttctttaaaagcatgtatatcttgtttcatatcagttaaagtgatgctgcggccacgcttcatattccattcatgccgattgaccccattaataattagacgttgaccatttaataaaacaaccttgtcagaattaatttcgatttttctaaagccgaattggtaaggaattagttcaagtaaatcaccattttcagcgtgaacttcaataattagttggtacaaatatgggtcatggttatcccaaagatgcacatttttgaataattctttttcaatttttatggttaagctgattggtgcttttttctcaagtagagttttgccattaatatcttctacgaacaagtgaactgagccagtatttttgcctgtaaagtgcaattgagcattaaagattccatcttggtaattatttgtaacttctggttttaaatcgagatcggttaaatgcgtctcaggtaggccgagcaattcaactgaacgaaaaatgccagaaaaacggaacatatcctggtcttccaagaaagaggcagtgctatgtttgaaaacttcaactgctaaaatattgtttttgtttttaatgtaaggtgttagatcaaattctgaaggagtgaaactgtcttcggcgtaaccaacaaaatgaccattgagccaaacatacattgctcgctcaactccttcaaaaacaatgtgaacatcacgacctcgcaaagtggaatttaagtcaaaatgcttaatgtaagagccaactgtgttatctgcacctttgctaaaagagtcggtagctttttggttgattgtgtaagcaggtcgacgataaatttttccttcccacggaaagagcgtattaatatattgattttgagcgtaattatttagctcaatttcacttgggactggaatgtgatcaaatgatgaagaatcgaaatctgttttaaagaaatcaacgggtcgtgtttgtggattagctgaaaacttaaaacaccagtcaccatttaaactttgaacaaaactactagtttgcttttgccattcgcgatagttcttgaaatagggatgatcgctgtgggcaggaacttgattaacgcggaaaacttcggggtcatcaagccagctaagatttgctttcatgaaaatacctgatttctataaaaaaattaaccttgaaaacgcttatattatagcatatagataataaatttacttaataagtaaattatttactgaaaaatattttgaagattaatctttttgacccgaaaacgaatgataaagtgcttatgatatttattggaattacgtaaatattttgtataataaagttaaaaattatttatttaagatagaaaagatataaatatgacaacaattaaagaaatagcacaagaatcagggtattcttcagctacggtttcgcgcttattaaataatgatcctaatttgtcaattacggctgatactaagaacaagattttagaaattgccaataaattgggctattggaaggatcatcaggagaagaagattcgtccaacaattgcgttactataccgagtaaatcatgaagagcaactgcaagatgaatattttacttcattaaagcaagcgctgatttcaacagtagaagcagagtcgctgcagatgaagactttttatgatgcagatgatttgattaaacatgcatcactttttcagggctttatcggagttggcgcggcgccaattgaaaatgcaacactaaaaaaactctatgaggttttgcctaatggggtctttgtcgatactaatccagcgcctgaattatttgattccattcgcccaaatttaacgctgacaataaaaaatgcaattgatctttttctcgataaaggatatcagcgcattggttttataggtggcgttgggcctaagcatgatcatattcaagaagtagatgtacgtgccaccgcttttgcggagtatatcaaggtgagaggcaaaagtgatgaattgatgtttgttaatggcccgtttagcgttgctaatggctataagttgggaaaagaggtactggctaaatgcaaaaataaattgcctgatgcatttttaattgcttcggatactttggcagttggagttttgcaagcttttaatgagaacaatgttaatgtgccaaaagatactgcaattttaagtattaataatagtaatgtggttaagtatgtttcaccgccactttcttcttataatattgatcaacaagagatgattgatatggcattaaatatgctaacgaatctgattattcaacctaatcgggcacacattgatgtaaatatgaatactaatttagttgtgcgcaagagttttgtgcctaagaagtaaattaattagtaaataaaaatattttttagtaatactctcaaaagagaatgctaatttaatgcgttctctttttgtttagctttcagtaaataatttattaaatataaataaattctttacttaacaaaaatagagaatatactaaactatgtaaacgattacaattaatgattgctttagggggcaaatttatgacacacagtgacaagtcagggaagcagattctttcctacgcatcattctgtttgggtaacttaggtcactcggctttttatggtgtgatgagtacatattttattatttttattactagcagcatgttcagtggacttaatcagtccgttgcagataagctgatcggcttaattacaggattgatggttgtaattagaattgctgaattggtaattgatcctattctaggaaatatagttgataatactaaaactagatggggcaaattcaaaccttggattttaattggtactttagtaagtgccgccttattattagttttgtttactggcatttttggattagcacaaaaaagttggattctctttgcgattttatttgtactaatttatatcagttttgatgtattttattcattatctgatgtttcttattggggcatggtaccagctttaagtgaagattcacatgcacgtggtatttatacttctttaggtgccttttcaggaactattggttggaacggattaacaattattgttgttccattagttacagctgtaacttatgcggtaactggtaaacatgaggaaggtgcgccaggttggttagcatttgcggcagtaatttcagcgttagcaattatatgtgccttgattgtttgttttggtactaaagaaaagcacaatattattagaaactcagctaagcaaaagactactttacgtcaagtattcggtgctattttccataacgatcagattttatggccaagtttagcatacttgctttactcattagcatatgtaattaccaatggtgttttgttctatatgtataaattcgttattggtaaaccaaatgacttctgggtagttggtgttattgcaacaattatcggtttctgtattagtccaatgtttccgattttgaacaaatacattccaagaaaatggttattcatcgctggacaaacttgcatggttttagcttatgttttgtttattttcggcagagacaacgtatttttgatggacttgggcttggttcttttaaacattaactttgctcaattggtaactgttttaacattaactgacgcaattgaatatggacaacttaagaatggtcaaagaaatgaagctgttgttttagctgttcggccgatgattgataagtttaccggtgcggtttctaatgctttagttggttatgttgcaattgctgctgggatgaccggttctgcaactgctgcagacatgactgctcatgatattagcacctttaatatgatggcattatatatcccacttgctttggcagtcttatcaatcgtagtctttttgactaaggtaactttatctgaaaagaaacatgccgaagtggttgaagaattaaaagatcaacttgcagaaggtaagattgaaaagaatgaatctaatactcaagttagacctcaagatcagactatctatgctcctgcagacggtaagttaatgaagatggcagaagtaattgacgaagatggtaagccattcccaggaaagggttttgcaattaaaccagattcaggcaatatttatgctccatttgatggtgtagttaggttcacttttggtactaagcatgcttttgaaattgtttcaaataatggtttacaagtagttgttcatgtcggcttaggtacagttaacttgcgcggtgaaggttttgaaacttattatgatgatggtcaaaaggtaaaaaaaggtgacttgctgttagagtttgatcgtaatttagctcttaagaatggctatcaggacactgtagttaccttctatacacaaccaggacgaattgtaaaatctagtgaaattgaagctggtaagattgttgagcatggtgaaaaagtattagatgtacaatttaagtagaggaattacaatgacacagttaaaacgttttttatatggtggggactataacccagatcaatggccagaagacacttggtcagaagatattaaagtttttaaaaaagcggatttaaattctgctacaattaatgttttttcttggagtttgcttgagtcaagagaaggccaatatgatttttcaaaattagatagaattattcaagaattgtctgatgcaaattttgatattgtacttgctacttctactgctgcgatgccagcttggatgtttaaaaaataccctgacgtagcgcgagttgattatcaaggacggcggcatgtctttggcgcacgacataacttttgccccaatagtaagaattatcaagttttagctagtaaattagtcgagaaaattgccgaaagatatagtaataaccctcatattgctgttgggcatgtgaataatgaatatggcggcaattgctactgtgaaaattgtcaaaatgcttttcgtacttggctcaagagtaaatatcaaacactagataacctgaatgaggcctggaatatgaatgtgtggagccatactattcatgattgggatcagattgttgttcctaatgagttaggagacgcctggggaccagaaggtagcgaaaccattgttgccggtttatcaattgattatttacgttttcaatctgatagtttacaaaatctttttcagatggaaaaatcaattattaaaaagtatgatcctaacactcctgtaactactaatttccatggtttaccaaataagatggttgattatcaaaaatgggctaaagatcaagatattatttcttatgattcttacccaacctacgatgcacctaagtatttaccagcatttttgtatgacttaatgcgtagtttaaagcatcagccatttatgttaatggaatctgcaccgtctcaagtcaattggcaaccatatagcccgctgaaaagaccagggcagatggcagccacggaattgcaagcagttgctcatggtgcagatacggttcagtttttccaattaaaacaagcagtaggcggctcagaaaagttccatagtgccgtaattgcccactcacaaagaaccgacacgagggtctttcatgaactagaagatttgggtaaaaaattaaaaaagattggcccaactgttttaggctctaaaactaaggctagagctgctattgtatttgattgggataacttctggtcatatgagtacgttgacggtattagtcaagattttaattatatggaatcaatcttagattattattgtcaattttatgaacgcaatattccgacagatgtaattagtgtcgatgatgattttagtcaatatgatttagtagttgctcctgttttatacatggttaaagcagggctaagcgaaaaaattaatgcttatgtcaaaaatggtggcaactttgtcactacctatatgtctggaatggttaacaatagtgataatgtctatcttggtggctatcctggcccgttaaaagacgttatgggtatttgggttgaagaaagtgatgcaattgtaccaggacataagacaactgtttcaataaatggcaaggattatgaagcgggtttggtttgtgacttgattcatccagaaaatgcaaaagttttagcaaagtattctaatgagttttatgcagggacggctgcagtcacggaaaataaatatggtcaaggtaaggcttggtatgttggtactaagttgggtcacactgggttgatgcagctattcaaccatattgttttgacagctaacgttgaatcattggtgggcgacagtcataagttagaagttactaagcgagttactcagtctgggcaagaattatactttgttttaaatatgagtaatgaagaaagaaaattgccacaaaaatttgtaaagtataaaaatattttaactggtcagcaagctcatgatcaaatggaaactgtcaaatcttttgtgtaaatagatctttctcgtaaattgattttttaattatttatttaatcaaagtaggattctaaggtgtcctgaacctgaccaaagcctttatgaattcgattgaaataacggtcattgtagctcattgcctgaatgccaataaaagcatcaagcgactgttcagttggaaactctgccttaggcttagctttgcgcttgatcacattgttaaatgattcaatcatgttagtcgaataaattgaagctctgatctgcttgggatagttataaaagaccagcagatctggttctatgtctttcaagcttctgataacatggctgtaaaccttgccccatttggtatagaagtcatgcaggacagctgtggcttcttctttgtttgtctgttgatgcacctgtttgaattcgttcatgatcttttcacgatcgtcgacgcgtactttagcgcagatattgcgcatgacatgaaccaaacagcgttgaaaatgagctttaggataagtcctggccaaggctgttttcatgccaacaacaccatcagaaagaaaaagctcaacttgctttaagcctcgggatttcatgttttgaagcatatctgtccagacttcaatgttctcgctaggtgcaatgcagtagtcaatgacctccttgtgcccattaggcttgatgccaatggcaatatagactgcttcacgctcaaatgtttctcggcgcaaaggaaggtatgtcgcatccaaatagacgcagaaaaacttgtcgcttagcttgcgtttgtggtaagcctcaacctttggaatcatctgcttggaaatatttgatacctgagctggactgtaatggctgccatacatcttttcaattagatcggctatttccctggtggtcacgcccttggagtaaagcttgataatcatgctttccaagatatccgagtgctgcttgtagccaggcagcgtgtgctgatgaaattgaccgttgcgatcccgaggcacttgcacttcaattgggccaaattgcgtatcaactttgcggaaataagcaccatttctagagttgccagtattccagccatttctggcatagggatcatagcccagaaaggcggtcaattcagcttctaacaagttattaacagcctgttgtagctctttgcgcaataaatcatttattttgtctggattgaatagagcttgagcaaaatctttggtaaaatcattcatgaaggagttcttctttctgtatgtgtttttttgttcaaaccaatcatacgagaaaggaactcctttttctaatgtttaaagaaataaatttaaggaatcattcatccttacacaaactattttacagtctcatcaaatgaaggcatgggatgtacaaatacttgttaaataaatgattttttccttaatgaagacaagaagttagacaaacgatctagcttcttgttttttacttaaataaatattttatttatttaagtaaactatttactaaaagatactgaagagatatactaatacttgaaaacgattacagaataaatttgaggtaaaaacaatgaataaggaagaattacttaaagaatatgagacaacttttggtgaaaaaggtaaggatgtctttttctcacctggtcgaatcaacgtgatcggtgaacacactgactacaatggtggtcatgttttcccagctgcaattagtttgggtgtttatggtgtttacggcccaagagaggataaaaaagtttgcttgttttatggcaatgttgatggcgatatcgtggaattcgatattgacgacacaactgttgagaaagatgatcgcttttgggctaactacttcaagggcatgattacgtacttacgtgaaaaatatgacaacattgatcatggttttaatctttatatcaaagccaatttaccatcaggttcagggctatcatcaagtgctgccattgaaatgctaatgggcatcattttaaaggatgaatttaacttagatgttgatcggattgctttagccaagatgggtcaaagaacagagaatgaatttgttggcttgaattcagggattatggatcaatttgcctgcattatgggtaaaaaagatagtgctatcttcctcgattgcaatacattagattatgagtataagccactcgctttaggcgattacgaaattattattatggcaactaacaagccacataccttagccgattctgcttataatgatcgtgttcgtgaatgtcatgatgcagtgaagaagttgcaggctaagttagatattaagactttaggtgagcttgataatgatacttttgatgaatatgcatatctgattaataatgaaactgaaattaagcgtgctcgtcatgctgttagtgaaaaccaaagaactttgcgggcaacaaaggccatgcaagatggagatttggaaaaattgggacgtttgattgatgcttcacacgtttcacttcattacgattatgaagtaactggtcaagaactagatactttagctgaagcttcatgggctcaacctggcgtcttgggtgcaagaatgattggcggtggcttcggtggtagtgccattgcaatcgtcaagaaagaccaagctgaggcatttaagaaaaatgttggcaagatttaccgcgacaagatcggttacgatgccagcttctatgatgcggaaattgttgatggaactaagagaatttaatcaaacaagaggataagtatgaaagttattgaaaaatttgcggatgaagttattaatagtggagcgtatgagccgctcgatcgcgtatatgtgattaacaaaattcgcgctttagttggcgatgaggcaagtagcgttgaagctaatgatgaacaaacttcagttaagcaattagttgatttagccgtgcaaaataaaaagatttcggatgatgttacttcacgtgaagttttgaatgatcaactatacgacttgataacgccaacaccatctaaaactaatggcatcttttggcaaaaaatgcaaaaatcacctgaaaaagcaacagattggttttataaactttgcgaaaacaacaattatgtcaaaaaggaagcaattgccaaaaatgttgtattctcagggaccagctctaaaggacatggcttagaaattacaattaatttgtctaaaccggaaaaggatcctaaggcaattgcggcagcagctcatgcaactggtaagaaatatcctcaatgtgcactttgcctagaaaacgagggttaccttggtggatatggcaaaaatgctcgttcaaatttgagaattattcgcatgaatattggtggccgcccttggggatttcagtattcaccatatgcttacttcaatgaacattgtattttcttagatcaaaagcatattccaatggtcatcaaccaacaaactttgattaatttggttgaaattgaaaagacgttaccacattattttgttggttcaaatgctgacttgccaattgttggtgggtcaatgttagcacatgaacactatcaaggcggacgtcatacttttccaatgatgaaagctaagattaagaaaaatgtagtctttgatgattatcctgaagtggttgctggcattgtcgattggccaatgagcgacttgcgcttgattagcgataattcgttagatttgattgaattgggcgctaaaattattaatttctgggatcattattcagattctgctcgtcaaattaaggcttttgatggtaaaacacgtcatcatactgtgactccaattatgcaccgtgaaggcaagaacttcgtacttgatctagttttgcgtgacaacaacactagtgaaaattatccgttaggtattttccacccacataaagaattgtggcatattaaaaaggaaaatattggcttgatcgaagtaatgggccgtgctattttgccaggtcggttaaagagtgaacttgaagaagttaaaaaatactggttgggccaagataataagatggctattagccacaaagaatgggccgatcaaattaaagcagagcagaatattactgccgagaatgttgacgctgtgatgcagcaagctttagttgaagtctttgaacaagtattgcaagatgccggtgttttcaagaataatgcagatggcgatgaaggctgggataagttcattaccgctttaactaggcagatttaactcatcaatgtgtaaaacgagatctgttggatctcgtttttttgttagcggtaactcatatattctgatggttaaataatttataatatttatgaaagcgaatacaaaagaagggcaagagtatgaagacaagttttagaaaatatggcagaaaagataataaagatctttgtgaaatcacactagagaatgatcacggtatggtagttaaggtattgaactatggtgctacattggaaaaggtgttgcttgatggtgagaatatgattttgtcactggataagccagaagattacgacaaggagcgtaattatctaggcggtacggttggacgtattgccggaagagtgagacgaggtttatggcggcacggcttagaattacatcaattaccaatcaatgaagggcctaaccacattcatggtggtattgggactgatactgaaatttggaattttagacctagttgtaatgaaaaaggtgctcgtgttgatttaacactttttgatccagatgggtataatgattatcctggtaatttaaaattacacgctcgttatgagttagataataacaatattctgcattattcattgggtgccatgagtgataagctgactatttttaatccggttaaccatactttcttcacattaggtgaaaagaaaatgattaatgacttgcaactgcaaatgaatgctgattattatattccagttgatgagactggcttgcctgatcgtggtatggaaaaagctgatggaacagcattcgattttagaaagaagaagcgagttggggatgcattggaagctgatgatccgcaaattaagaaccgcgatggaatggatcatccatttatcttggatggcaatatgccaaatgcagtgctaacttctgctaaacacaagttaacggtaacgactaatgcgccatctctgattctgtacactggtaatggctttgaccacactggcaagtatacagctgactttggtccgtattgcgggattacttttgaagcacaagtgccgccagcagaaggtgatgatttgggacgcatcacgcttttgccaggtgaaaaatttaagcggactgttgattggaaatttgaataaaaatatggagaacatccttactgaatgaattggtagggatgtttcgagactgtaaaatagtttgtgtaaggatgaatgattccttaaatttatttctttaaacattagaaaaaggagttcctttctcgtatgattggtttgaacaaaaaaacacatacagaaagaagaactccttcatgaatgattttaccaaagattttgctcaagctctattcaatccagacaaaataaatgatttattgcgcaaagagctacaacaggctgttaataacttgttagaagctgaattgactgcctttctgggctatgatccctatgccagaaatggctggaatactggcaactctagaaatggtgcttatttccgcaaagttgatacgcaatttggcccaattgaagtgcaagtgccccgggatcgcaacggtcaatttcatcagcacacgctgcctgactacaagcagcactcggatatcttggaaagcatgattatcaagctttactccaagggcgtgaccaccagggaaatagccgatctaattgaaaagatgtatggcagccattacagtccagctcaggtatcaaatatttccaagcagatgattccaaaggttgaggcttaccacaaacgcaagctaagcgacaagtttttctgcgtctatttggatgcgacataccttcctttgcgccgagaaacatttgagcgtgaagcagtctatattgccattggcatcaagcctaatgggcacaaggaggtcattgactactgcattgcgcctagcgagaacattgaagtctggacagatatgcttcaaaacatgaaatcccgaggcttaaagcaagttgagctttttctttctgatggtgttgttggcatgaaaacagccttggccaggacttatcctaaagctcattttcaacgctgtttggttcatgtcatgcgcaatatctgcgctaaagtacgcgtcgacgatcgtgaaaagatcatgaacgaattcaaacaggtgcatcaacagacaaacaaagaagaagccacagctgtcctgcatgacttctataccaaatggggcaaggtttacagccatgttatcagaagcttgaaagacatagaaccagatctgctggtcttttataactatcccaagcagatcagagcttcaatttattcgactaacatgattgaatcatttaacaatgtgatcaagcgcaaagctaagcctaaggcatagtttccaactgaacagtcgcttgatgcttttattggcattcaggcaatgagctacaatgaccgttatttcaatcgaattcataaaggctttggtcaggttcaggacaccttagaatcctactttgattaaataaataattaaaaaatcaatttacgagaaagatctatttacacaaaagatttgacagtttcgatgtttccttctttggatattatgatttgattttacaagtaaatccatattaatatttaaaatatttagaaatcaactgaaaggtatagtaaaaatgatgacaaacgaaaagattattgctttagtcaaggaagaatatctaaacaagattccaaaaatttttcgcaagcatgctgttgaaggcacttgcaagttaatcgctagagaacatcccgatttatacaaggcttttgaagatggtgaaccaaccgcagaagaaaaacaacaaatgacagagttgattaacgggattttcgaacagagaatgaaaaagcataagatgttataaaaagacgctggaatgtaatgattattagatcgctacattctagcgtttttttgattttaattttgatttattaaactaacaggtagcgtataaacactttctaatgaaacagagggatcattaatttgacgtaaaagtaaatcgcacattaattcagcaatttcttttgtatgttgccgagcactaattaaatttggaaaaagactttgaatcaaatgactaccatcaaatcctgtgattaaaggtacttttcctaaataatcagcacattctttagctagtaaagctgtaatgtcatcggtacaacaaattgcatcatattcgtcatcctttaaaaattgaaggatggctatttttttagcaataattgagtcactggcactgagtgagcgaagatcgaatttagaatcaaaagtgttaaatacgcgaatcattcctttgattcgatcacttattgggtaatagtcttctttagcaccagcaataataataattttctttttcttttgttttagaacagattgtgcgatttgcatacctgcgtcatagttattagattgaacagttggtatttgaggactaagtttacggtcaaagctaacaataggaaactttatttttagtccttttttaggaatcttaataggagagctggtgatcagtccagcgatttccttttgtttaaatcgctctaaatagtaattaatatcttgggattgatagtgatctagatgaagaatacaatcgtatcctttttcctgtaaataaaaggctagatattcaaataattcagaataaaaaggattattaatttttggaaaatcaacctcaattaaatttaatttagatgtagtattgactgtattttttgttttgtagcctaatttttttattgcttctttaaccttaagagcagattcaatacctacatatccattttgattaatatatcttgaaactgttgctatcgaaacgtttgcttctttagctatatctttaatagtaactaccatattttttcacttccttatgtaaatattacacatttaaaatcctatatcatagtattttgatttatttaaatgtgtaaatttgtgtaaatccattgaaaactgtaaatagaagtgtatgatgtaattgtaaatatgatagcgcttacttaaagagagcgatatttgatcaagaggagtgaagatttatgaaaaagtggctaaaaagaatagctttaattagcttagtcgctacgatggctttaagtttgacagcttgtggtcaaaataaaagcagcaattctggtaaaaaagtgacaattgagtactttaaccagaaaaaagaaatgtcagcaactttgaaagaaattatcaaagactttgaaaagaaaaatcctgatattcatgtcaaagaagttgacgttcctaatgcaggtacggttttgaagacaagaatgctttcaggagatgttcctgatgtaattaatatttacccacaaaatattgattttcaggaatgggcaaaagcaggttattttgaagatatgactcatgcttcatatattaaaaacattaaaaatcactatgctgattcttttaaaattaacggtaagatttacaacgcaccacttagtgccaacgtttacggtttcttctataatgcaactgaatttaagagattaggaattaaagctcctaagacttgggccgaatttgaacaaattgttaaaaaaatcaaggctagtggcaaggcaccatttgctgtagctggtactgagccttggactttaaacggatatcaccagttatctttagctactgttacaggtggtgctaagcaagctaaccaattacttaggttctcagcgcctaacggcattaaagtaaacaatccttatgttcaaaaagattttactagattgaacttacttcgtgaaaatacacaacaaaattggcgtggtgctagttacaagaaactgtcaaatcttttgtgtaaatagttctttctcgtaaattgattttttaattatttatttaatcaaagtaggattctaaggtgtcctgaacctgaccaaagcctttatgaattcgattgaaataacggtcattgtagctcattgcctgaataccaataaaagcatcaagcgactgttcagttggaaactctgccttaggcttagctttgcgcttgatcacattgttaaatgattcaatcatgttagtcgaataaattgaagctctgatctgcttgggatagttataaaagaccagcagatctggttctatgtctttcaagcttctgataacatggctgtaaaccttgccccatttggtatagaagtcatgcaggacagctgtggcttcttctttgtttgtctgttgatgcacctgtttgaattcgttcatgatcttttcacgatcgtcgacgcgtactttagcgcagatattgcgcatgacatgaaccaaacagcgttgaaaatgagctttaggataagtcctggccaaggctgttttcatgccaacaacaccatcagaaagaaaaagctcaacttgctttaagcctcgggatttcatgttttgaagcatatctgtccagacttcaatgttctcgctaggtgcaatgcagtagtcaatgacctccttgtgcccattaggcttgatgccaatggcaatatagactgcttcacgctcaaatgtttctcggcgcaaaggaaggtatgtcgcatccaaatagacgcagaaaaacttgtcgcttagcttgcgtttgtggtaagcctcaacctttggaatcatctgcttggaaatatttgatacctgagctggactgtaatggctgccatacatcttttcaattagatcggctatttccctggtggtcacgcccttggagtaaagcttgataatcatgctttccaagatatccgagtgctgcttgtagccaggcagcgtgtgctgatgaaattgaccgttgcgatcccggggcacttgcacttcaattgggccaaattgcgtatcaactttgcggaaataagcaccatttctagagttgccagtattccagccatttctggcatagggatcatagcccagaaaggcggtcaattcagcttctaacaagttattaacagcctgttgtagctctttgcgcaataaatcatttattttgtctggattgaatagagcttgagcaaaatctttggtaaaatcattcatgaaggagttcttctttctgtatgtgtttttttgttcaaaccaatcatacgagaaaggaacccctttttctaatgtttaaagaaataaatttaaggaatcattcatccttacacaaactattttacagtctccaactttagataaattacttgatcaaatgatgacgcaatttgagcagttaaataaaaattatgaaaaaggacatggagaacgtctctatgaacatttacgtggtcgggtaaaaagtgaagccagtatggaaggcaagtgcaaaagaaaagatttaccgttaacgccacaatcagctttgcgtgctaatcgagatagtgttggattgcgtgttgtctgcaattttattgacgatatttatacctgtattgactttattaagcagtgggataatgttaatgtttatcaggaaaaagattatattactaatgctaaaactaatgggtatcgttcatatcatatgatttttgacgtgactgtacctgatgaagatgttgacggcaatataccgggtcattattttgttgaagtgcagctaagaactatcgccatggatacttgggcaagtctagaacatgaaatgaaatacaagcacaagattaagaatcctgagatgattggcgaagaattaaaaagagtagcagatgaattagcttcttgtgatgtatcaatgcagacgattcgacaattaattagggaagaggattagtaaattaatgaaaattttagtagcagaagatgaaccacagctattgcgtgttttaaccgttgccatggaacatgctggttatgatgttgatccagtggacaatggactaaaggcagtagaacatgctaaagaaaattcttatgacgtaattatgttagatatcatgatgccagtcatggatggaattactgctttgaaaaagatccgtgagagtggcgacaagacttatattttaatgttgaccgctaaggccgaggttgatgaccgagtaactgggcttgatagtggtgctgatgattatttgactaagccgttttcacttaaggaattgctagcacggctgcgttcaaaagaacgtcgagaagatgattttacacctaataaattggaattaggggatgtaactttaaatgtatctaagcaagagttagttagtcataactcaattcgtttgagcggaactgagactcagttgatgaattattttttattaaatcaaaataaggaattatcaacggaagaattgcttaatcatgtttggaaaaatgatattgatgcaaacgctgatgtagtttggatttatatttcatacttgcgacaaaaactgcaatcaattcaaagttcagttcgaattgaaggcgataagggtgactcgtataagttagttaagtaggtgagcagatgattcaaaaatttcgttggaagtttattggtacttctgttgctgccttatttgtagtcctattgttgaccttaggcggcttagtttgggtgactcatgttcaaagtcaaaatgaagtagatcgggtgctgacagctttagttaaaaatgaaggacgtttatcacctaaaaatgccaagccagcttttggtgaccaacgcgatccaattaatcgcaattttttaggtgggcaatataatcctgaagcggtttatcagtatcgctattttgcagtaatgattgatgaaagtcatcgcgtacatgtgatcaacgataataatgtttacaaggttaataattctaagattcagaatattaccagagcagctttagaaaatggagacaaaagcggtgtagtcgccctagggcaaaatcaatatgccttcagagttgctaaaaattctactggtgaaacgatgattgtctttttaaatgagaccctaatttttaatcgtttttggttattattcagggtagctttagttttaggattaggagctttgattgtcttcgctttagttttgattttagttttaggtaaagcaatcaagcctactgttgatgcttatcataagcagcaggagtttattactaatgctggtcatgaattaaaaacaccattaagcgaatacagaaatggaagagatgcttggcaataattctgaatggaatgaaagcaataaagagcaagtagcaaaattaaccaaattaattaatcgtttgatttcgttagctcgtaccggcgagatgggtgaacttaccttaagtaaaattgatttttcaaaaattgttgaagaaacgactaaagattttaaatcagtcatgaagaagaatgacttagtttatcaagtatcggtgcgtgaagggctgaatgttttagctgaaaaacatactttagctgagatagttaacatcctattggacaatgcccagaaatattgtgatcctcatggcaagattcaggtaaaattgactaaaggtggtaccttaagtaaatatgcagttttgcgggtagaaaatacttatcgtgaaggtaaaggcaaagactatagtcatttctttgatcgcttttatcgtgatgataagtcacataattctaagaaaggtggctttggcattggtctagccatggcacaagaattagtggaagcttttcatggtaaaatttcggcccaccataaaggtgaagacattgtttttactgttagtttaaaaattgctaaatgattattctgtgatagttgtataattagaacagaattgggggatcattttggcgaagagaaaatcaatttataccaaagatgttgtcctggttatggcagcatctttcttttttatgtttagtacaatgtttgttaatcctttgattaatggatatgctaaagaattaggcgctagcagtgcttttgctggaatcattgtcgggattatgagtttagcagcaatgtttttgcgaccggtagctggcaatttaaccgataaattttctaaataccgcttatcgtttattggcggcgctttaatttttgtaggagtaatgggctacgttttgactccgtcaagtggttggcttttgctctttaggttaattaacggcaccggttatgtcctgtgcacagtttgtatgactacctggcttgcttttttagtgccgcgccaacatgttggtgaagcaatgggcttttatggtttaatgaatgctttggcaatggcgttagctccagcagtttcgattaatatttatcaaaaaataggttatcgaacaagtttggtggcatcagctgtttcagctttactaatgattgtagcaattcagtttgtgggtgataatgctttgcctaaaaagcgcgtccgaacgcagaaaaagagtttcaaaattattcaatttaatgtcctaccggtggcaattttgacaactttatttgctatcccgtattttgtaacacaggcagatattgtaacttatgtagaacaaaaacatctgactgtcgcagttggatcatatttcttgatctatgcggttgttttgttgattattagagtaggactaaaaaggtattttgatacagtacgttttggcgtctggttttggctaagtctagtttcaacggctacttatattatcttgctcgcaataatgaataatgattggcaaatggctttagcggcagctttaatggcgtcaggctatgggatcatttattcagttttgcaatcaactgcgctgttgttagcaccgattgaagaacaaggcttagctagtgctactttttatttaggattagatattgctatggcctttggcccgatgatcagtggtgtaattgattctgctttaccgatagaatggttctatccagtagaattagtcttagttccattgattttagtagtttatttcatttggcgtaagcgtttgaatggcgcaattgaccatcattagagggaaaatatgagcgaatatgtagttaaatctaagttagaagataaagaatggcaaattgccaaccaagtacgtgatcatgtttttgtttgtgatgatgttaaacatgatgcaggtcccaacccagttgagtatctatgtggtagtgttaattcatgtattgtgatgtcggcagggatgattactaaagcacatcaacttgatgttaaaaattttagggtagaaaatcaggcacaaacggagaatctgggccatggtaaatcagtagtaactgagatgaagatcaaggtcttctttgattcgacaatgactagagccgagaaggaagaatttttagctcacactttgcatgtttcaactgtttatcaaactattaaagcagctgtcaaaatttatgtggaattaggagaataagcgatgagcgagccatattacaaacaagaataccagggtgaaagaaagttagatggtgaggccccagtttttagttttgatcaaattatgaaaaaaacttttctgcgaccatttatctggaatgcaagaactaccagaagaagtttctggattggaatcgttattactgaagttataatttggattggtggaattattacatttttggcaactgttatgccagtttctcactatgagaatgattcagctgatatgataaatggttttgcttttaatggtgatcacgcttcgatgattgtcattatcggcatgatcatttggggcttgatctatctttatttgaaattatgccaattaggcctagccgtaagaagattgcatgatatcaattatacaggttggcggattctgttaatgctgataccgttaggttggatttttgttctgtattttgcaattcagccaagtaaacaagagccggtgaaatggggaacgtatctttaccttgacgaataataaaaaaatgttataattacgcgtggtgctagttaaatcgttctagacaatatgccatattataagctaaaatagctatttctagccgttgttgaaaacctactaagctcctggctcgattattctcagcattgtaatagctaagcaaagaaaagtcgctttcgattgttcttctaattgccattaactgatgatcattatgctttttagcacccctcatgtttttacgatatggtgtccaaagcacgtatcccatacgctttagcttggctgctaagtcttttcctaaatagccttcatctcctaaaagataatggttaattggatgagcattgatcatcaattctaccgtctcttttgcatcatgtaccgacgccttagtaactgcgtagtcaagcagatagccatcatcactcactattgcgtggactttgaagccataatagtagatttttttcgtcgctttataaccaatatcggctatgccacggaagatcttaacgtgataattgcgaacaggctgacaaactggaatcggaaaactgtcgataatcaataattctccacctacctttacttcctgattccaaccctgacggatacaacgaattagaggcaagagcattcgagctcgacggttaaaacgagaatgagataagccaacgaagaatttacagaatcttcgttgagattcaattccaatttcagtttgccaaatgagcatcgctaagatagaactatcaggaagcttggtctgatcaacatttttacgatgtttaagtccatcaggcgcataaagcttatacagcgagcgacaaatcacatttaaccgattaaaactaacttgtaaatggtgagaaaaacgcttaagcttgagatagttcaattagatcagactcttttctatttaaattacttacaacttgagtctagtctaattggacttttttattaactaaaacgatttaactagcaccacgcgttataattgaactataagagattacgttaggagattatttcgatgaaaactaagaatttatttacttcattagctgccgcagtgatgctttcagctggtttagctggtgcaggtgtgtctgctgcagaaccagttcatgcagcaactacacaaacttcaagcaaaaaaggtaccattagtattaagcgtagatcagtatcagctacagttaataatgctaatcctaagctttacgctgtaaaccaagatggtaaaatcgtaaagtcaatggattcaaattatactaaaggtcaaaccatccagctttacttctctaacgaggctaagaacgatcaaggttctgttactttctattatgttgacagtcaaactgtagatggacaacaatgtgcaatttatgttgtttcgactgatgttaccccttcagcaacagttccaagtcaagcagactggtacaagcaagcacaaagtgaccaaaaagccattcaagatgcttacaataatagagcattaaagtacatcgttgtttcacctaagtcaaaaaagggtgcaaagatctactacgcatataagaagagtgctaaggctaaaaaggtttactttaaggcaaccaagaagaagatcaagtacggtaagaagtacaagtcatcgatgatcgttaaaaacggtaagagcagatatgcttatattggtaagaagagatacttaaagacctctactattaaagtagtaagtgctaagtacgcaccagttcaattatcagatgatttgaagaacttaattgttcaaaactagaaaaagttaataaaaattgtagcgtaaaggatgaattattgtcctttacgcttttttgatctaaaaattaataataatattgataaaaaatctcactgacctacaatagactttgcgttatttttagggagttgtaaaaataagaatgaagagagtaaaagtctatttaggattagcttgtttgatgacgttattatgtttgaagccgcaagtggtttgggctcgagaactaaatccatttcagactaagatgattaatccgcatacgtcttatagaatttatcaaaacttaactcgtaaaggtccgtcaagaagtctatgccttgctaatacgtttaaacatggcaatgttcaagccagtgcagttagaaaagttcgcggcaataagtattgctatgtttggttagacggacatagaggcggttgggtcaatcagcgagcttttttaagaagaaaaattgcagttgtacatcagattagtttagtgaagaattcgcattatagttttccaactagggatgcgattaattatgcaacagatgcagcaggaacggtaattgagccaagtaaagttaaagtatctcgagcagaagtttcatcaagtaaaaaggaaagctatcgggtaagttattcttatggtaaagctcatgctcagacagttgttcaagtgagagctaatgctagagagggcattgttaaagcaaccaaaaaaccacaagctggagacagtgctcgtagctggttcaagcactataagacgtctggtaattggggtagaagctttgctccggaaactagaccgcatgtcttgaaaagtggacattttagactgaaaacctatttctatcaacctgcgactttatgtcaaagtgattcggtaactggaacggtgggaccagtaccagaagggcttactgtatcaaatggttcaatgtatgccacaatgtatcattcacctaatgatacgcgtgctcacattgtttcttacaaatttaatcaagtgcctaatcgctatactatgcaaaagttgccatggctaccttggtcacaatttctgcggcttgtatcccatgttaagacaagcccatatattaaattgggacatggacaagcaatcggttcaactcgaaagtatatttatgtgattgctaataaccatttattgcgcaagagctctcaatcagaagaaattatgcagattagtaaaaacaatttgcaaattaaacagatttggacttttaaagtttggaatcattcagctagaacaggtcgttatttccataatgctacttttgtaaatgatcaccaatttattgccgtttaccgtgatgccacagaccaccgttttgaatattgggaagttactcgtcagggtaatagttggtatcctaaagagattggcgctactagaggagattttatgcgcaatgattctcccgttcaaggaattacctatgacaagcataaaaaacagatttatttggcctttaatgattatttgtttaaattgaaacgctcaggtaaagtgctggctagaggtcactttcatacagggcgtgaatttgaggggattagcataaatggtcgtcatttatacgcagagctggcgcaaaggccagaattgttgaggcagaggataagataataggtgtaaaaatatgttatacccagataaattctatttaacacaagatttaaatagaagatttgccagaactaaccttgctcgactaatatttagtgatttgcattttgagaaaacaaatatttctttaattcaaacacaattagttgctgatgggttaaatatagagagggcttccgagaaagataaggaaagaattattcgattaaaacgagcatggcaatatattattaatgaaaataaggtgttatctttagatattgaactaaagatacatttattactgacaggctatggcttccgagataatctaaactacaaacaagaagaaaaatttttcgatgagttaatgaacaacgatacctcgactacagataaggcaatgacattgatgtatcataatatgcgtaatcaattattctggggcggaaataagcgtactgccacactagctgcaaataaattaatgattgaccatggagcaggtttaattaatgccccacttgataagtgggatagatggaacaagctgattagtcaatattatttaaccggcaaaatgaatatgttaaaagattggacctatgaaaatggcattcaaggagtagtgctgaataataattcagatttacctaaacctgatattaatccagaagattatgattaattacttaagcagaccgaataggcctgctttttttgtgtgcaaaagctctttttgaaaatatcatgataaaagttcataatagaaattgtttgtttatgttaaaggagttgttttattttttatgaagaataatgatcacgttaagataagtcctagtagtcttgtcttgatgattttttcttctatttttggatttagtaattcactgacagctttttatcaaatgggttattcaagtatcatttggtatattgtcacagctattttattcttcctgccatcagccttaattttcgctgaatatggtgcttcctttaaaggaattaaaggtggaatcttttcatggcttgaaggatctactaatgaaaaagtatcatttatcggaacttttatttggctggcagcttgggtaatttggttagtttcatcaacccaatttttcttagtttcagtttcaacggcaatttttggtcatgatactacccaaagctggcatttagggtcgctgacttcaactcagttattaggtgtgttggaagttattttcttagtaattgttacattttgtgccgcaaagggaattgataaaataaaggcgattaataatattggtgggatctttactttaggaattgccattggttttacagcagtttcactttttgtctttattttgaatcatgggcaattagctgaaccagtgaccgcacaaaatatggttcattcacctaatccagcatttcagtcaccgattgcggttatttcatttattgtctatgctttatttgcctatggtggtctggaaacaacctcaggagtaattgattcagttgataaaccggaaaagaattatcctaaggctctgattacggccatggtcttaatgacagcactttatgttgtaaacatctttatgtgtggggtggctgttaattggaacaaatcgttaggtggtaaaggtgttgacttagctaatgtcgaatatgttttgattaataatttaggtattgtcactggtcatagcctaggtctatcacattctacttcactggcaattggaactgtcttttctcgtttggccggaattgcggatgtgttatcaggaattgccgctgcctttttgatggtttattcaccgattaaatcatttattgaggggtgtgatccgcgactattgcctaagaaaatggttaagttaaataagcacaatatgcctgaattctcgatgtgggtacaagcaattgtggttagcgttattatcttatttatttcatttggtggtaatggagcacaacaattctatacaattttaatggatatgatgaatgtttcttcatcagcaccatatttatttttaattgctgcttacccattttttaaagctaaaaaagacttagatcggccatttgtttttattgaaggtaagaaaaaagtttgggcaacgacaattgttgtttggttagtggttgcggtcggaattatctttacttgtatagaaccactctttaccggagactggcaaacttcattctggacggctattggtccagtggcctttggtgttattgcttggatttattacgcatataatgaacgaaaagaaaaagcaatggcttaatacgcaaaataagacgaaggattttgtccttcgtcttatttcttttctctattttttactttaagccagctactctgacaacatcacgttcaatcattaattcctcattagttggaataaccataccaacaatagttgagtcgggcttggtaataatggtggcattttctttattagcggctgaatcaggcttaaggcctaaaagttcgagtgaatccatgacatgttcacggacaccaaagtcgtgttcaccgacaccagctgtaaaggcgataccatctaggccacgcatttcaagggtataagcaccaacatagcgaatgattcgattaatgaaaatgtttctagctaagtcagcacgcttcttcttttccccttcgagcttagtcatgtcaccacgtaaatcacgcatatctggtgaaatgcctgaaattcctaacaaaccagattcgttgtttagaaccttaagcatttgatcagcatcaagattttcctttttcatgacaaaagcaagtaaagaaggatcaacatcacctgaacgggaactcatcgtaatacccgccattggtgaaaagcccattgaagtatcgaatgatttaccatctttcacagcggtaactgaagcaccagatcctaagtgacaaacgattaatttcaagtcctttaagtcgcgtttcataatttcagcggctttttgactaacatatctaaccgaagtgccatgtgcgccatattttcttgcaccgtatttttcatagtatttatatggaagtgagtacaagtagtgcactggatccaaggtttggtggaatgaagtatcaaagacagcgacttcagggacgccaggcaatactttcatgaaggcattaatgacatcggcttcagcggtattatgaagcggcgcatattgtttcaaatcataaatcttttgtagtgacttttcatcaattaaggtggagtccttaaattcttcaccacccgcaacaattcgatgtccgattccgatgatttctttaggatcgtcaattaaatcatacttttttaaattttcaagcaagattgtaacggcagtttcggaatcaggaatgtcaactttttcttggtgtttttcacctttaaccttgattgtaaaggtggagccgttaagcccaactcgatcagccatcccttcgctgataactttttcatcaggaaaggtgaaaagcttaaatttaaaagaagagctacccgaattaatcgctaaaatttttttcataaattatgcctctttttcttaatttttgcagtgcaacctatccagtaagggcatgcaataaagaaaatgccactaatctgctttaagtaagttcttgcagtaatagtgtcaacgtctttattatacaacttttgctgtaagctcttacagatatttttttattactaaaatttatatataaatttgattgatcatatataaatttagaatatcaatttgcaacaaaaccgcttacaaactataatgaaattaacatacaatatatattgagaggagaaaaacgaatgacccactactacgaaggctttccacaaagtgaccgcgatgaaaaaatcaagatggtgaatgtggatgaacttgaagaacgtgttaagaaggtaatgccagaaggtgcatattattatattgcttcgggtgcagaaaatgaatggacctggcgtaacaatactgctgcttttaatcattttcaaattgtacctcgtgctttgactgagatggctgatccgcaaactgatactgattttatggggatgcacttaaagacgccaattatgatcgctccaattgcttgtcatggaattgcacataaagatgcggaagtcgcaacgcaaaagggtgctgctatggctggtgcgctctttagttctagtacttatgctaataagagtgtagaagaaattgcagctgcagctccagaagcaccaaggtttttccaactttatttgagtaaagactggaattttaatcagatggtttttgatgcaattaaaaaagctggttatcaaggcattttcttaaccgttgatgctttggtatcaggttatcgtgaagcaaacttgcggactaactttacttatcctgtaccattggacttctttaagcgttaccttggtgcaaaaggtaaaggtcaaagcgtagctcaaatgtacgcttcttctgcgcaaaagattggtcctgaagatgttaaaagaattaagaaagaatcaggtttgccagtctttgttaaaggtgttatgtgtgctgaagatgcctataaagcaattggagccggtgctgatggaatttacgtaactaatcatggtggtcgtgaagttgatggtgctcctgctaccattgatgttttgccagaaattgcgcaagcagtaaatcatcgggtgccaattatctttgattcaggtgtccgtcgtggctctcatatctttaaagctttggctttgggtgctgacattgttggaatcggtcgcccatatctttatggtttagccttaggtggtgcgcatggagttgcttcagttattgaacaattaaatgatgaattaaagattgatatgcaattaacgggatgcaagacaattgatgatgttaagcatgctaaattgacgcacattgcttatactgctgataatttgccatctaatactgatccaagcagacgcaaggaatatccggtaactgacgaaaatcaagttaagcaaactgatgcggtatctggtgcttctaagttagaaggaaagccagctccggaaccagagactgataccacaactggtgcttcagtaagataaagcaaaaatataattaatattttcaatatgattgtcattgaataaatgatagtcatatttttttactatcaagaactcagcggctacaatcaaggtgaaagcgattcgatttttggagaggaaaattaaattattgaagagaataatgttttgactgatactgaagagcttaaaatcttgagtgatcttgttgcaataaaatccgttaatgataatgaaattttagtagcaaaatatttacaaaaactattaggagaacatggaattagttcacgtttgttggaatattccacaactcgcgcagatttatttgctgaaatcggaacaggccatcccattttagcaatttgtggtcacatggatgttgtttcaccaggtgaattagatcaatggcatactgatccctttaaattaaccaataaggatggtaaattgtacggccgcggagcgactgatatgaagtctggttgtgtctgggaaaaaactagcttccagatgaataaaaacgatcaagatttccttttttaagaatcttgatcgtttttttgttctctttaaaatttttaacaataaaaatcggcccttcagccaccttctttgacaatatttgttcaaattcatcatcataaaggcaattccgatatcgatttcgaccttctctttacctcgcaggtgcgttctgcgcatgccaaatacgttcttcaaatgtccgaaaactggctctacatcatattttctcatgccatagatgtgtctgccttcttcgctttggagaacttcttttgctttttcttttaaatattgccagttaggattatagcgaacttggcgctggcggccgctagctgttttagccaattgttccaattctggcgttagctggaactcgtctgcctcataaaccttaaaatcacggacctgaccagtagaacgatccttacgctggctgtaatatttgaaattgaatctgacgccatgatgatcaatgtaataatcatctttttcattgtagtaccagttgattagcttagttggatcattcttatactttctggtctgttctttttcatacatagtgtagggaataaagtacttcttgtctggatatttttcctccagcatcgaataattgtattcactgccatagccagcatcggcgacgattttgtcaaacttgtccaacacggtcatttgatccaaaaccggctccaaagttttgaaatctgtcggattaggaaagatggcataatcaactacatattgatcggtcgtgactgcttgaatattgtagccaggctttaattgaccatttttcatgtggtcttccttcatatgcataaaggtggcgtcatgatctgttttggaataactgttgcgtccggcaaagatctcttcggcttcttcatatttttgcattcttggcacataatcttttcttagccggtgcagaatcttttttagtccacgtcgcttggcttttcgaggtgaaccgccaggaatggctttgttttcctgctcaatctctttagtcagcttgttaatttctgcttcagtttcttgagctaattcctttagcccctgactagtttgaactttttctttttccatttctttgactacttctttagtaatcaattcatcataaagttcaactgcctggcctttcagcttttcatgatacttttcaaccgctttgcgccagacaaatgtatagcggttagcatcagcttcaatcttagtaccatcgataaaagcagcaccttcattgattaagccttcatcttctaacaggttagtgaagtagataaagctctttttaatcagttcattggcatggctgcttgatctaaaattattgatagtatgatatgaaatcttttgctggtcagccaagatcatcattggcagattttcttccagcatcaactcaatctttctgccagaaaaaactcttctggagtaagcaaaaagcagtattttgagcatcatggctggatgataggctgggcggcccgttttagcagtcttgcctactaaaacatcttctggaattgaatctacaaaccagctgatgacattagccaaatgattggccggaatggcaaaatctagattaagtgttaaagcagtttgacctgtgatataattcttgtacatgttagtttccaccttttttattttgtgatgatttaataatatcaaggctggagctaaaagtatacaaaaagagcgttgaaacaaaaattcaacgttcttttttcatgatctgagacttagttttttcccagacactgatatgaagtctggtttagctgccttgattattgccatgattaatattcatgaacaccatttaattaagcatggtagtatcaggctgctagctacttttggttggtgaaccttctggctacagtattgccattgctcataagggttcgatggatactaagttaacttcccaaggcaaggaagctcatagctcaatgcctgaaaagggttataatgcgatcgatccattaatggatttattagttaaggccaacaaggcttttagagaaacagataaaaacaatccagacttaggtaagttgacgttcaatactactgtttttactggcggggaacaggtcaacatgattcccggagaggctaccgcgcaaattaatgtgcggactattcctgagttcaataatagtttggttgaaaagaaattaactgaattagttaaggcagaaaatgcgcaaggagctaaaatcaaaatggacatctatatgtcggaaccttcaattaaaactgacggtaagtctgaatttgtaaaattagcccaaaaaattggagcaaaatatgcggaaaagccgattccaacagttgctattaaaccagtaactgatgcttcgaatttgattgccgacaaaggacctagctatccgtttgccatgtttggtcccggtaatgacacgccgcaccaagttaacgaatatgttgatgaaaagatgtatttgaactttgtgaagatctatactgaattgtttgtggcctatttgaataaataatttggaaagtaataaagagcctaggcaaaattttagcctagacttttttattgtattttgaagtattctttagccgcatcactcatccgttcaggggtccaaacaggataccagacaaattctacatcaacatttttaacttcagggacttttttaacggctgttgtaatctgcttgatcaaataatcagtcaaaggacaggcaggtgtagttaatgtcatattgatgagacagatcccatcttgatcgaggtcaatttcataaatcagccccaagttgaccacatcgacgtttaattctgggtcaataacttgagctaaatgttcaataatatcgtttttaattgttttgctatcacgcattgtgttacctacgcatctttaccaaaaatttttgctttaattgcttgacctgttggtgtaccagctaaaccgccgattccagtttcacgcagagatgccggcatttgatgaccaactttcttcattgcttcaatacattcatcagctgggattacacttgtacatcccgctagcgccatatcagctgcgataagtgcattaccagcgccaataccatttcttttgacgcagggaacttcaaccaaaccggcaatcggatcacagactaacccaagcaagttagacatcgcactcgataaagcttgggcactttgttcagcactgccaccagctacttcaactgccgcggcagcacccatggctgaggcactaccgacttctgcttgacagccgccagttgcccccgcaatttcggcattattggcaatcaccatgccaaaaccgccagcagtaaaaagaaagcgaatcatttgctcttcgctgagctgtaatcttttttctaataaaaatagaacgccaggtaaagtgccggaagaaccagccgtcggggtagcgcagacaacgcccatcgctgcattgacttcgttagtggctatggcattttcaactgctgccatcattgtatcgcctgaaagtgtgtgtcctttctcgcgatattttttcagcttaattgcttcgccaccagttaagccagtttttgaaaagacaccgtttccagattcacctcttttaacggcagctcgcatagtttgcaagttatatttcatgcgctgccagactttttctcgtggcaagcctgatagttgacattcttgttcaataattaattcagaaataggtttgtgcgttttttctgctgcagcaacaatttccttaatatggttatacataatattgccctatgttataaacaaataatattctcaaattttttatttagttcttgcaataaatcaggatgaagataattttctacatcatattcataaatattatagtttttagtatgaaaaattcgtttgcgactaaagggtgctttttcgtgtaagagcgcggtaagctcttgttcaatgcgaatatttttgtgtggatcaactaaaataataataggtaatgcaccagcaggttgaatctcggtattatgtaagacaattttgcgaatttcaattgcaccaccaccgatagagcatccagccaattccactttctttttatcattagacatatttaaaatagcagtattagggtgaccaattgggctaggaccatcttcttcaacaaaacgtaaatctacgccgcgctggcgtgcaatctcaggtgcctttggtacgcgtagatcgtctgagtcaaagcctaaaatacctgccgcaatagcatagtctgttccatgaccacggtgagtttgggcgaaagagtcgtaataatgaacggtaactttactcggggtaccgccaaaaagtttgtaaccagcgcgtccaatagcgacggctccggccgtatgtgaacttgatggtcccaccattacggggccaataatgtcaaaaacacttttataccgattagtcattttaatccctgctttgtaagttattctgtttttaattataacgaataataaagaagattaagaaagttttttgcaattttaaccgaagttttgtcataataatatgaaaagtgaaagaggttggttaaatgactaaagaaaaagcagaattaaaacaaagtttggagcatctagctgagcaaaagggcagccagcaggcagtttcttatcaagacttatttacaccacaattgatgcaaaagtatactagttttgctactattgacttttttgtcagagaattgggcgtgaaagactttacgcaaattgagcagatggcgatagatcaagtcgatgaatttgttaaaaaagagaccaagtttgctagctgggaagaaatgcaacaaaaggcggttagcgagtacatgatgaagttattttagcaacaaaaagcgagttagtattaactttaaaactaactcgctcttttatttactatgttaggtgaatgacttgagcacctaattcatcaataaagcgctgatcatgttcaattactagcatagtaggatgatattttttaattaattgaataatttgttcttggttaaagacatctaaatagttcaaaggctcatcccaaagatacaaatttgctggttcaagtaaggacttggctaagtagacctttttttgttggcctgaagacatttgattaattgaattagtgaatatatcacgttcagtacctaatttgtgtaagatattgagaaaatcggcatagttaaggtggtgcttttgggcaaaatcttttaatgataggttattagattgttcaatctgtgataaataggagattgaaatcttatcagctgaatgcaatctgccagtaattgttccagcaaaagtattagtaattgccttaaacaaactagattttcctataccgtttttaccagtaatcacaatttggtgaccacgcattaaatcaaaggtagtaggttggaaaaggggaagcttgtcataagcaaggctaactcctttagcagtaattagatgtttatgatggtcggggacaaaattcatggctaggtcattgtctgcttcaatattttttaaaagaccctttctttcttcgatatttttatctaatcttgcttctacatttttggcaagtttcatttttttggcggctttgtgtcccatgaatcctttatcgtaaactgtacttctatgtcgaatatcgcctttcatcttggctcccgcatttttgttgctttcggaacgctgggcaaaagtttgcatcttttgttgactggcatggagatttttaatttgcttttctaactttgcattataagcgatattagattcatcttctaattctttttgtttttcataacgagtatagtttccttgttccagcctaattttttgcatttcaattgctagggtgtgatcgacaactttatctacaaaatttcggtcatggctgattacaattaatccctgttttttattatgcagatattgtgctacttgattccgtgtatcttcatcgaggtgattcgttggttcatctagtagggcaaaggaatgttgattaataaaacaaagcgccagtaaaatttttgtttgttcaccgccactaagtgttgaaaagggctgccaaatgatattttctttagcatgaagcagatttaattctcgttttaactcccattcctcgaaattaaactgttcttgtaaagcataaatagtaaggttatcgggattattaattacctgaggatagtaattgaattctaaatcactttgaatagttccttgatattcgacctgttttagcaacattttcataaaagtggttttgccgcgaccattacgaccgattaagccaagtttccaattagaatcgagatttaggtttaaattatcaaaaattttatcctgaccgtcataggcaaatgaaacgttttttagtgaaattgtagacataaaaaagcaccgtcctctcaaactgtgcttatgatctgagaaaatggtgtctgatagattagtccaagttggctaatctataattattcttaatttaaattaaagaaaatcacgcaggctaatttctgatcacaagcaaaaagtacatccttaaactagtagaatgcattattttttacttaacgaaaatcagaaattaaaaacgcatcggcgtgagtcctcctattacttgaattgattaatctggcaatactttaccatcaaatataattatttgtcaatatttttatgataattcatttgcaagctgtgattaataagtgataatgtctgagaccgtaaaatattttgtgtaaggatgaataattccttaaattaatttcttaaaacattagaaaaaggagttcctttctcgtatgattggtttgaacaaaaaaacacatacagaaagaagaactccttcatgaatgattttacccaaaatatggcacaagctctattcaatcaagacaaaataaacgatttattgcgcaaagaactccagcaagcagttaatgacttattagaggctgaactgactgcgtttttaggctatgatccttatgccagagctggctggaatacaggcaattcacgcaatggtgcttactttcgcaaggttgatacgcaatttggcgagattaaaattcaggtgcctagggatcgcaacggcatgtttcatcagcacacgctccctgactacaagcagcactccaatgtcttggaaagcatgattatcaagctatattccaaaggcgtaaccactagagaaatagccgacttgattgaaaagatgtatggcagtcattacagcccagctcaggcatctaacatctccaagcagatgattccaaaagtcgaggcctatcatcagcgcaaactcagtgacaagttcttctgcgtttatttggacgctacctacattcctttgcgccgagaaacgtttgagcgtgaagcagtctatattgccattggcatcaagcctaatggtcacaaggaagtcatcgattaccgcattgctcccagcgaaaacgtcgagaattggacggaaatgcttcaagacatgaagtctcgcggtctagaacaggtttagctctttctttcagatggcgttgtgggcatgaagacagtgctggagcagacttatccgaaagctcattttcaacgctgtctagttcatgtcatgcgcaatatttgcgctaaagtatgcgtagatgatcgcgaaacgatcatgaatgaattcaagcaaattcatcaacagccaaataaggaacccgcgatcaaagtcttgcacgctttctatgacaagtggaacagagcgtacaaccatgtcatcagaaatctcaaagagattgaacctgatctgctagtcttttacagctatcctaagcagatcagggcttcaatttactctaccaatatgatcgaatcctttaacaacgttatcaagcgtaaagctaagcctaaagcagagtttccaactgaacagtcgcttaatacttttattggcattcaggcaatgagctacaatgaccgttatttcaatcgaatccacaaaggctttgatcaggttcaggataccttagaatcctactttgattaaataaaagattaaaaaatcaatctacgagaaaaatctatttacacaaaaaatttgacagtttcagattaaatttcttcactacttaattcaaacatattaataattgatttaaacatagataaaagttgtttaactattaaaaatgaattttgtgaatataatgttatcgataacagaaatcatttttatattgcaaatgaaagcgcatacgtttattgttgaatttgaaaaaacatgattttgtggaggaatttatttatgaataaaaagagtggtcataatatcaaatttaaatcaatttttgtatgtacttcagctattatgagtctttggttaggggcaaacttaactacgactcaagttcatgctgcagaggacaatgcagctcctaaaagttcagaagttgtaggccaaacgaattctagcaaagataatgcagctactgctactgtacaaaatcaaagtaacgcagcgtcaacaaggtgtagctctcctacagttttggcagccaaaactaaagatgagggaacaaataactctccagcacgtgaggaagttaaagatcagactaaagtagttattcactacaatggtgatggtgaaaaatgggttccttatatttggggtaagaaacctaatggtaacggcaatgaatacaaatgggccggcaaagatgataatgggtattactcggttattgatttagataaaaactatgaccaagtaggagttttaattaaaaccaaaggcagttgggctggtaaagacggtacaggtgctgatcgtagcttaaatgttagcgataatggcaaagcggaagtcttctataaagcaggtagtgatgatgcccaaaaggtaacaccagagtaccattccgcaaatataaatttgcattattacggtgatgaccaagttaataaggttaatgtttggacagataaggatcaagataataaacaacttattagcttaaccaaacaaggcaatagtcaagatggctcaatcaaattagacaatactgattttaataaactttttgttgcgccagttggttctgatgaaataacaagagaattcactccgttaccgggtaataaggcgacagatatttatttagttaaaaatgatacagaagcttattatagcaagagttttgccttagctgatcaaagtctatcttctgcatatatgacttcaccagatagtttgactgttgaagcaggtaaggctactactgtcgataaaattaaaggaaaacttagtctgcgaaataatagtattgatcatattgaagcagtcgatgctaatactgatggtaaagcaaagaaatttattattcataccaaagcagatattgatattttaaaggataaccaagttggactagggatgaactttaaaaatgttgatatcggtccttatgttcgttccaaagcttttgacgataaatatgcctatgatggtgacgatctaggctgcacctatgatagtaaaaagacgcaaattaaactctgggctccaactgctaaagaggttgaattgaatttatatgatagtgttgataatagtgccaagcctacgaatgttattgctttgacaagaggcgatagaggtgtttggactggtattattaagggcgataaaaaaggctgggcttatgattttaagttaacttttggtaatggcaaaataacacagactgatgatccatattctaaagccgttactgtcaatggcgttagaagtgtaattgaagactacaataatatcaaaccgacagattttaaccgaatgccttcattctctaagccaactgatgcaatcgtttatgaaacttcaattcgtgactttagtagtgatcctaactcaggaattaaagataaaggtaagttcttagggatgattgaatcaggtaagacaccaactggacaagttactggcttagactatctcaaggcattaggcatcactcatgttcaaattatgccttcatatgatttcgctagcattgatgaaactaagagtttaaagaatcaatacaactggggttacgatccaaagaattatgatgtgcctgaaggatcatattcttctgatccaactaatccaactgctagaattatcgaaatgaaagaaatgattaatggcctgcataaagctggtattagggtcattatggacgtggtatacaaccatgtttataatcctcaagagcaagcttttgaattaacagtgccaggatattatttccgttacgatgctgataataataccacaagtgatagtggctgcggtaatgacattggtagtcaacgtaaaatggttcgcaagtacattgttgactcagtagtttactgggctaagaactacaatctagatggcttccgttttgatatcatgtccttactagatcgagagactatgaatgatgttagagctgctctagataagattgatcctggtattattacttatggtgaaggctgggaagttggtaaccagaaatatactagagaagaaggaacgacccaatacactgcggataaagttcctaatgttggtttctttagtgatgatatgagaaactcggttaaaggtaatgatgatggctccgaaccaggattagtaattggtaacggtaatgaaagaaactttgataagcatgctgtcttgtttaccgatagttttttaagaggtaaatggttacataatgattcttgggagccacataactatgcaactccaagccaaatggttaattatgccgcttgtcatgatggtaagacgttgtatgattacatcaaggctgcaatgccaaatgaatcagatgagaatagtgccaggagagtaagattggctaactcaatgatcatgctttcacagggtatttctttcttccactcaggtcaagaagcattaagaactaaaggtggcaattcaaattcatataattcaccagtaaatattaatgaaattaattgggaaagagttggtgctaataaagcatcagtccaatatttccaaaaattggctaaattacgtaaacagctgccaattttgcatttgaatgatttcaataagatttatgacgagaatgttactaaaattattagttatggtagagaaaccaaagataaaaacatcaagggtgtatttgagtacgaatataatgttaatggcaagaagttattaattgtctttaatgtcaacaatgataaagttgctctaaataatgttgatttatcacatggtaagaaattgttagatagtgatggcaatgtgaaattaagtgataaaactatgctggcaccattaagtacgcttgtagttgatgaagatggaacaatggttttaccagacgtgccaaaaccagatcaacctgtaagtccaaccactccaggtgataagccaggtaaaccaactacaccagaaaatccaaggattccggatcaaaagccagccaatccaattgttccgcaagaaacaattattacacctgaagctccaagtgaaaatagtattatagacaatactaaaaatataattaatggatcagaagagactactacagtttctactcaggataatacaaccactgaaatattattgacccataatgcttatgtgtatgacagtgaagcaaatcctatttatcaaaatgataacaagcttgtcttgaaagctggagatacaattaagcctttggataatggtaaaaagtatagtattaaaggtaagttgttctataaagtagctaaaaatcaatttgtcaaagttgctaatactgttagttactataagttagctcataactcattcgtttataataagcatggcaaagcagttaagaagaatggaaagcgcattttacttaagaagaataagcatatttcacttcattctgataaggtcgttaagattaaagggaagaaattctatcaattaaaagatggtagctttattaaggctagaaatgttaaaagaattggttagatttagatagttaattaaaaatattaaaaaacaagattgtttccaaaatgggcaatcctgtttttttaatcctgattaatcaagctaacgggcaaagtataaacactctccaatgataccgctggatcattaatttcgcaatctctttagtccgttgccgcgcactaattaaatgtgggaataggttctgaatcaattgtgtgccgtcaaatcctgtaattaacgattttttatttaaataatcgttgcattctttagccaataaagccgtaatgtcatccgtacaacaaatcgcatcgtaatcgttatctttcaaaaattgaaggatagcgattacgatgcgataattgattcacgggcgctaattgagcgtaaatcaaatttaacgtcaaaggtattacacacacacatcatccctttgatacgatcactgattggataatagtcttctttggaaccagcaataatgattactttcttctttttttgctttaaaaccgactttgcaatttgcatccccgcatcatagttattcgactgcacagtagggatctgcggactaattacccggtcaaaactaaccaccggtagattaagcttgccactcttctttgaaatctggattggcgagctggtaagtaagcctacgatctttttttgcttatatttatccaaataatactgcatatcttgctcttgataatgatctaaatgcaaaatgcaaaatgcaatcataacctttatcctgcaaaatagtagccaagtattcatacagttctgaatagaaaggattattgatttgcgaaaaattgatttcaattaagtttaattctgttttagcggaaattacattcttgggtttataacccagttttttgatagcttcctttatttttaaagccgaatcaatgccaacgtaaccattctgattaagatatcgcgaaacggtggcaatagaaacgccggcttttttagctatttctttaatagttactgccatgttttacacctttatatgtaaatcctacacactttctatcagtaagtatagcatattctaaaacctgaattgtcaaattaagtgcaacagttaggctatgaggaaatatattgcttaaagagttcttctgctgtgtgatattgaaggattcgacgatgtttgcggttaatggcatcagttgcctgttgaacataagcagctgacttatctttcatgcttttgcctttagggaagaattgacgcagaagtccattgcagttctcattggtgcctctttcccatggagaatatgggtgggcgaagtagatctggcagcctttgatcttggtcatatccgcaaactcagagccattgtcaaacgtgatcgatttaaaacaggcaggatgtctgtcaatctcattttgaagcagccttgggcatgtgcttgcccgatagtcaggaatcttgataactacttcaaagcgtgtggttctttcggtcaaagtcattaaagcaggctgattcttgcgtctgacgcctttaaccagatctccttcccaatgcagcggcgtttttctgtcttcaatctctttaggacgctgttcaatggaattgccaagatgcttcttgtgcaaagcgtgaccgccatggctgtgatgacgcttgttcctgcgtcttttgagcttcataggcagatcaatattgcttatgtccagcaagccctgatcaatatagcgatagacggttggtgtgctgggacaagggtagcctggcatagtccttttgaattcaccaacgaattcatcgatgctggtggcatcaaatttagctttaaagcgtccccaaaaagacagcataatgcttcaatggattgcgctgatagcagtttttgcgacgcttctcataataaagctgtgcagtatcagcgtaatagtgctcatacaataaatagctgctgtctctttgcaggacgcttccgcgtttgatttcgcgactgattgtcgacttatggcagccgacttcttgagcgataacagtacgggaagttatgccggaatccagcattgcttgaatttgtccacgttgtacgctggttaattgatgatagtgcttagaaatgctagaatttgaattggtcatgaagatcttcctttcttgatttttcgtcacttcaagtttaggtcttcatggcctttttgtttaacactcagtgttgcacttcaattttaaatccgggtccattattaattcctttcatagaaaactaaattccttttctaaaggggtcaagagctattatatacagttttctcagcagttacattcgcaaaaaagaaaaatgctaaatttatttaaaatatttagattttttatgcaataaggacaaatagctaggagaaagaacaaagaatatctccccatctattgatgtaacgctaaaacataatttactttctttcttttttgtgtatactaaatatacacaaaaaagaaagaggcgtacaactatgactgtaaaattaagaaaagttggaaattcaaaaactttaacagttcctaaagatataataattactagtaaagagtatactgtgaaaaatgaggggatgaatatagtttttacacccgtcgtgaagaaaaagaaaaatatttttgcaaccaaagaatggcaaaattatgattatcaaaaagacatagaaaatgacgtggaactacaatcagtaaaaccagtgggacgtgaggtagttgattaatgatttatccgaaaaagggagatattgttaaagcagatgcagaacctcattccggacatgaaatgggtggccataatccgcataaaggtaatattagaagacattatgtggtaatgagtaccagtgcctataataaatcaacacatatgtttatagggatgccgattactacttcagataaatatcaaggcaacccacattacgagccaatattaattccaggcagtaatggcactggagtaaaaggttatgttgttttatggcaacttcagaattttgactttgaatctagaaatggagaaattgttaatcacgtaaatattcagctattagacaaacttcaaggtttcgcgaatgatatggtgggactagaataggtaaaacaattatgccaattttaaggctagttcgattatgctgagaggacgattctgaggtcaagttcgactgcagaggttaaaatattaataatcatttaatgcaatagaatgctaattcttatttttatgggaaattagcattcttttttgtactttctaactatgtagaataatgagattttattctacatagtacatctaatcatgcattattctgctatgccaattttggggtgtgttgattatgtagtataattagctatagactaattattcaacatagagtgacgaaatacttgtatatcaaggactaatataaaaattgacagaaggagacgtaaattgaagcataaagatactcgtccaattactgatccaataattttaaagaagtttttgaaacatttacgtgaagatactagtatgggagaaagaaactatgctatatttcaaaccggtaaagcaaccttactacgggtaagtgatgttctagctttgaaaaagaatgatgtctttcaagccaatggcagagttaagaaaaatgcttatatcgttgacaaaaagacaaaaaagcctaaccgattatatttaactccagttagtgatgttttagaggattactatgattggctgcaagaatatgaaaagaagcatccctacacgaagctgttttcttctgaatggctatttccaagttctaggagattaggtgaggatgttccaataagagaaaatagtttttatagaatttgtcatcagaccgggcttaaaattggggttaattggattggctcacactcaatgagaaaaacaggagcttttatggtttatcagcagactaatcataatactgctttagttatgaaaatgctaaatcactccagtgaagcaatgactttaagatagagaccgtaaaatattttgtgtaaggatgaatatttccttaattttattttcctgaatattagaaaaaggaatccttttcccgtatgattgatttgaacgaaaaacatactagaaaagagattccttcatgaatgattttaccaaagatatggctaatgctctattcaatcaggataaaattaatgatttatttagacaaaagctccaacaggctgtcaatgacctgcttgaatccgaattgactgcctttttaggctacaatccttatgagcgcgatggctggaataccggaaattctagaaatggtgcttattaccgcaaggttgatacgcaattcggacaaatagaaatcaaagttcctagagacagaaacggtgagtttcatcaacacactatgccagattataaaaggcatactgatgttttagagcaaactgttatcaagctctattccaagggcgtcacaacccgagaaatcgctgatttgattgagaaaatgtatggcggctattattctccagctatggtttccaatatttctaaagaaatgattcccaaagttgaggcatatcatcagcgacatctgtcagataagttcttctgcgtttatctcgatgccacctatattcctcttaagcgggtcacttatgagcgcgaagcagtttatatcgccatcggtatcaaacctaatggtcataaagaagtgattgactactgtattgcgcctactgaaaatattgagatttggagcgaaatgctcaaaggcttcaagagtcgcggccttgaacaggtagagctcttcttgtctgacggagtagttggcatgaaagaggctatctgccagtcctatcctaaagcgcattttcaacgctgcttggtacacgtcatgcgtaatatcagtgccaaaatgcgggttgacgatcgaaaaaagcactggatgaattcaagcagattcatactcagtcaaacaaagaaatgactgtacaggtgctgcatgaattctatcaaaactgggaaaaagcctacaaaaacgtagttagagatcttagacaggttgagcctgatctgttaaccttttacaactattcgccagctattagagcttcaatttactcaactaacatgattgaatcctttaacaacaggcttaagcggaaaaccaagcctaaaacagaatttccaactgagcagtcgcttgacacctttattggagttcaggcaatggattacaatgaccgttactttaacaggattcataaaggatttgggcaagttcgagacaccctagaatcctattttgattaaaagataagtaaaaaagtcaatcaacgagagagattatttacacaaacttcttgacagtctctaatgtcttaactgttaacttaggaaaatgtcctaattgtagtaagtatgacataatttcctttattggaggttatagttagagtgaataggattgatttaactatgaaatatgatgaacagtacaaagtcattaaggatcttgtagatcacaacggcaataagaaaagagcagccttgaagctaggaatatccgttagacaaataaacaggagaatcaagcagtatcaagctaaaggaaaagcggccttcgttcatgggaacaaagaccgcaaacctgttaattgtctcaccacagaaattaacaatcaaattgtaaccttataccgtactaaatatcaagactgcaatataaaacattttgtacagctgttagatcgctttgaggacattcatgtctcttataccaaagcttacagcctgctcaagcagcaggatattctttcccctaagccttggagaaagactaagcgtgccttagccaaaaagaaatggcataagcagcaccctaagcaaagcaaacaagaagtcagcgctgcagttgatcatcaactagctttggcagatgctcatcctcgccatgaaagatgcaagtacttcggcgaagaaattcagatggatgcttctgtcttagtctggtttggtaagcgtaaggcttacctgcaccttgcaatcgacaacgctactggcattattgtcggggcttattttgactgggaagagactttgaatggctactatcacgtctttgagcaaattcttaaggaatatggcattcccctttgctttaagactgataatcggactgtattcaattatgagactgctcaaaccaaagctgcccataaagatgtgctgacacaatttggctatgcctgcaaaactcttggcgtagatctaaaaactactagtgtttctcaagccaaaggcatggttgaaagagctaaccaaaccgtccaaggtcgccttaagccagaactaagattggctggaatcatgacaatcaacgaggcaaataaatacctgcatgatgtgtttgttcctgactttaaccaaaacttcagtcagactagtcgtaaagcctggtctgtttttgaaaaggctcctgatgaccgcaaaatcaattataccttggccgttctcactggcagagtgtttgatagcggctcagctatttctttcaaaaacaagctttatcaagcaacagatgaatatggcaaattagtctgcttcatgaaaggaactaaatgtctggtaattgaagccctagatggacaactgctaacgacagtagatgagcatgtatatctgcttaaataaattcctaagaatgccaaaatatcgccagaagtagaccaagagcctaaaaagaaaaggaccaagaaaaagtggattccaccaatgtcacatccatggaagcgagaatcattcataaagcaacaaaagagagctcataaataccatcaatacgtataaaaatagcggagagcaaattctccgctaataattaaataattttgggacattttcctaaattattgacatatttttatgataattcatttgcaagcgtaagtcctcgtaaattggttttccacctaaaatgtccagaatgtagtaagcaacgaaagtaacaataatcattggcaatacttgctggacagtcccaatcatttcagtcagtagcataattgctgtgaatggtgctttttctattgcaccaaaatatgcggccatggaaatcactaggatatgagggaagtacattggcaaaataatctgcaattttatcataatattggcgcaaattattcccaataatgccccaagaactaggataggcatgaaaataccatcaggtacggaagaatcatatgaaagcattgaaaagacaaaccgaattatcaagaataagatcggtagtaaaagaaagtcccatgatccaaaggctttgacattccaattcaaattgaataaattatcaattaacacatgtgaaccaccgagtaagtgggcattaaatagaccaactggaataattaaaattaaaggaatgatactgtgataggctgcagggatttttttaattttactgaaccatggctttagcgaaagtagtacatattgataaatgtatgccattattcccaaaaagataccaattaaaggtaaagcccagtatgcagtaacaggtaaataatcgttaacgggtaaataaaggaatggtttgtttccaaaggctagaatagtaacgaagtcagctgaaaaagtggcggccaagacggctactactttttgaggtttaaaatcaaaagtaatttcttcgaccaagaaaagtgcaccagctattggcgcgctaaaggcggcagccaatcctgcagccacaccgcattattgtagcgttctcaaattttccttgttagatttaaatactttttctgctaatccttgaccaaccattgcgcccatttcaatacaaggaccttcacgacctagcattaatccaggacagatagctaataagcctccaataaatttccgccaaagaatggaccaccatggcatcttattttcatttaaaagaacagcctcgatttgtggtacccctgagccaattacttgttcaaggtaaggcgcagttattttacctaatgttattgcaataatgaacatcaataagatgtagggtacgatcagtactcgctgggctgccatttgcggataaatttgataaagcaacttcatagtttgatcaataatccagcgaaatgcgctaactataactccagtagttagcccaactgaaattgcttgaaccaaagttttagtcatgttggttgaaaaaaggttttgctaaaatctgttttgcatttttaatcattacatttccccatattacagacgatacatcctttttatcctaacaaaatatagcaaaaaaggcatttatgtttttgatgaatgatcttatttttgtaaaaattgttgttcccaatcatagacattttttatatgcttctttaaagcgttagaggctaacaaaatatcttttttctcaactgcagaaataatatccattatttcctgaaccgaggatttcatacaacgatcattgtctacgatggcataacgcatacgattggtttgagtacgtaaaagatcgatggttcgctgaagcgtgggatttccggtattttcagttaaaaatacatggaatagttcatcaagtttaagataagcttgccaatcatgttttgctaaaatttcttggaattttattccataatcattagccagttgtggatctaaattgggaaaatttttttccaaggcataactctctaatagagaacgtaaatcataattgtcttttaattcagctaatgtaatatggctaacgatttttttgtccttgacgaactagtaagccttcattttccaattgtttgattgcttctctaattggagtacgagacatgttaagtttaatacgcgtttgattttctgataaaagatgacctggcttaaaatgaccagtgtttatttgatctttgataaaaagatatgctttttcttgattattcatttggttctcctaactaagataattttacaacttttttattttttatattatttgcaactaataaaactaaaaacttgtatacaggttatctgtggtaaatcgttgacttacaaaatataagttttactatgtaattgtaagttaaattttgatagaaatgaggaaagaaaaatgactaaaattgcagtacttggtgcaagtggacaaattgctaaattagcagaaaatttatttttggaagataaaaataatgaattaattttatttttacgccatcctaataaattggataaaaaagatatcgatgatcaacgtgaaaggattgtcgtaggggatgcaagtaaattggatgaacttgctccggctattaaaggcgcagatatcgtttatgctaatttagctggttcaaatattgaagatcaagctaagacagttgttaaagctatggatgaagatggtattaagcgtttgatttggatttcctcgttaggagtctatgatgaggtaccaggcaaatttggtgaatggaacaagaatattttaggttcatatttgaccacttatcgtgcagctgctgatcaaattactgctagcgatttggattacacgattattcgtccagcttggttgaccaataaagatgaagttgactatgaaataactgaaggcgcaactaccccatttaaaggaactgaggtctctcgtctaagtgtggctagttatgtaaatgaaatagttaaagaccaaagtaaagacagtcgtggtaatgttggtttaaataaaccaaataccgacggtgataagccagcttggtattaaaacaaaaaaataaagaccagcttcaaactgaaactggtctttattttggcttaattatttttcgaattgtttgccccaagcccatggatcttcgtgccaggtctttaagacatcatattgcgtgctagaaatatgacctgactcattttcctttttgagtaattcagggtaggaaagaagcggagcatatttaacattagctttagcaaagttttcttttgcatccggtaggtagtaggtgaaaattgaagaaacgccaatgacgttgccaccatctttttcagttgctttaactgcatttaaaacggaaccaccagtggtgattaagtcatcaattaaaacgatcttatcatctttactgaaacggccttcgatttggcggcctttgccatgatcctttggcttaggacgaacatagatcattggtaagtgcagtttatctgcaacccatgcggcatggggaataccggcggtagcgacgccaccaataatagtagcctcagggaattctttggcgattaaattagctaaatcaccagcaatcatatcgcgtaattctggatatgaaaccgttaacctaaggtcggtgtaaattggagaaagcatcccacttgcgtaagtgaatggtttgtcaggtgagatagtgataattttttcttgaataagttgactgataatttgatccttatgcattttagttaaactcctttttaattgcttcatatgcagcttctgggtcactggctaaagtaattggccgtccaacaacaatagcgcttgagccccattctttggcttgcgctggtgtggccacgcgagattgatcgtctttagcattgccagcaggccgaattcccggtgtgacatataaaaagtcatcgccaactttttcgtgtaattcttttacttcaagtggtgaacaaataaccccatctgctccagagtgcttagccatttttgctagcgaaagaacttgctctttcattgacagtgcgcaattttgttcatgtgccaatacttcatcagaaatcgaagttaattcggttactgctagtaacttaggcacgcttttgccaacaggtgtacccgcgattaaaccgtctttagctgatttgatcatttgactgccgcctaaagcatgaacggtagtaaaagtaattcctaacttagctaattgtttagccccgttataaacggtattagggatatcatgcaattttagatccaagaaaatcttataaccttgctcagctaagtctttaaccacttggttgccagcgtgatagaataattccataccgactttgataaagacgttttctggtttgcctaatttagacaaaatcttatgcagttgctcttcattgtcaatatctaatgcaacaattacaggtttcatttttcctccacaaaaaaagtctatcttagcgcagagagacaccaaggatagacttttcctagataatttaagtcaatattttgaacttgcggtctctctgtaccgtttaaagtttgatcaaggtgaagtttaacacctcaaaagtaaaaatacaaataaaatttttgcttggaaaaaattataatcacgtgtagaatcatttcttgaaaaaataaagagtgtccgtgagcattcattttggaggaaaattatggttaatacacatgtaaaattaccaggtttagatttgaaaaatccagttatgccagcaagtggaacttttggcttcggcgatgtgcctgcagctaagaagtttgacttaaatgatcttggagcaatggttattaagacaactacgccacatgcaaccacaggtaatccgcaaccacagattgccgttttagatgatggggttttgaattcggttggtcttactaatcctggtgtgaacaaggtgattagtgaaaagttagaaccattgagaaagcaatatccagaattaccgatcgtggctagcgttggcggtgatagtgaagcagattatgttgaagtagcacaaaagctgtcaaattccggcttggttaatgctttagaaattaatgtttcttgtcctaatgtggcccaaggtggaatgagctttggcgtgcatgccgatgtggttgaagaattgactagaaaaattaaagcagttgtcaatattccaatttatgtgaagttaacaccaaatgtgactgatatcactgtaattgctaaagctgccgaaaagggtggtgccgatggcttatcgatgatcaatacattgctagggatgcgaattgacgtgaaaaaacgcagaccactgttaggccataatatgggcggtttatcaggtgaggctgttaagccaatagctattagaatgattagtcaagtgcgtcaaattacttctttgccaattattggcatgggtggcattgcttcggccgaagatgtggtggaatttatgttagcaggtgctaatgccgtagcggttggtactgctcattttaaagatagtattgcttctaagcatattgcagatgccttgccgcaagaacttgaaaaattaggcattgaagatatcaatgaattagttggtcaagtaaaatttaattagagcttgacaaacgtttctaattacagtaactttaaagcaatgaatgtcctttaaaattagtcccgtgaggctagcgaggcaggcttaacttaagtttcgactttactaaagctcctagtctcagttgagattgggagcttttttcatgggcagaattaggaggctataatggcaaaagaaatctgggatgcactagcaatgaagcgtgctttaacccgtattacttacgagatcattgaacaaaataaaggaaccgatgatttggttttggtagggattaaaacgcgaggcgtttacttggctaaacgaattcatgaccgtattcagaaattggaaggcgttgatgtaccagttggtgaattggacattaccttatatcgggatgatcgtcatgatgctagtttaaagcaagatccagttgtcaattctgatcaagttggtgttaatattgatgacaagcatgttgttttgattgatgatgttatctatactggacgaacaatcagagcggcgatggatgctttgatgcacgttggtcgcccaagttcaatcagagtcgcagtgctagttgatcgtggtcaccgtgaattgccaattcgtgctgattttgttggtaaaaatattccaacttctgccgatgaacaggttgctgttaatgtaattgagaaggacggcaaagattcagttgaactgaaggctttaccaaaataaaaagaagatagttaaatatccaaccatttaattgactccagagagggccagaagggttgatttcttttcgtgtacacgggaagactctaggcctggagcaattaaatgcttcaggcttttttgtatagaaagaatagaaaatggaaaatttaaatcttgttaatttaccacattttgtgagtgttgaaaatttggatagtaatgaagtagaagccttaatcaggagagctgagtacttcaaaaaaggcggtgcaacaccacgtttaactaagccagtttatgtaactaatatgttttttgaagattcatctagaacacatacgagctttgaaatggctgaaagaaaactaggtttgacagttattccttttgatccggctcattcgtctgttaataagggtgaaaccttatatgacacttcattaattatgaacgccttaggtgtcaacttagaagtgattcgtcactcacagaatgagtattacaatgatttgattaacttaaaagaacatcaacatttaaatattggtgtgattaacgctggagatggtagcggtcaacatcctagccaatgtatgctcgatatgatgactattcatgaacattttggccactttaaaggcttaaaggttgcaattgttggtgatattactaattctagggttgcaaaaagtgacatggaacttttgactaggttgggcgctgaagtttacttctcaggtccaagttactggtatgataaagaattcgatcaatatggtaagtatgaagaaattgatcaattagtttcaaatatggacgtgatgatgctcttacgggttcaacatgaacgtcatgcaggcgatcctaatgaaaagacttttaatgctaaagcatatcacgaaaaatatggtattaatcagcaacgctatagtgcattgaagcccgacaccatcatcatgcatccgggtccaattaaccatgatgttgaacttagcggtgatttagttgaaagcgataagtgcatgtttgtcagacaaatgcaaaatggtgtgttcatgcgtatggcaatgatcgaggcagtattgcgcggtagacgacttggaggattagaataatggcaacagtaattaagaatggcacagtttatcaaaatggtcgtctaattaaagcagatgttttaattgaagatcaaaagattaaagcaatagggactaacttaacggcagataaagagattgatgcaagtggcaagctagttagtcctggactggttgatgtccacgttcattatcgtgatcccggacaaacttacaaggaagatattaaaaccggtagtgaagccgctgctcatggtggttttactatggtaggggcaatgcctaatgtaacgcctgtacctaatacgcctgagctaatgcaaaaaatggtacaagaaaacaatgaaaaaggtgtggttcatatttttcaatatggaccaatcactaatgatgaaactactgatgtcattcctgattatgcagcattgaaaaaggctggtgcttttgccttaagtaatgatggtcatggagtccaaactgctcaaacgatgtatttggcaatgcaaaaagccaaggaaaataatttgatcattgctactcatgcacaagacgattcgctttttaataaagggatcgtgaatgaaggacctaaagccaaggaattaaacttgccgccagtaactgaattagcagaaacaacgcaaattgctagagacttgcttttagcacaaaaaacgggcgtccattatcatatttgccatgtatcaactaaaactagtgtggaactggttcgaatggctaaggcgcgtggaatcaatgttacctgtgaagtagcgccacaccatattttattaacagatgacgatattcctaaggacaacggttattataagatgaatccgccattgagaaataaggaagatcaagcggcgttactagtgggactactagacggtacaatcgatttaattgcgactgaccatgctcctcatgctcgcaatgaaaaagaaggtggcatgaagggcgcagcatttggtattactggtagtgaaacagcattttctactttatatactaaatttgtcaaagaagaaaaagtcttcaccttggagcagcttttatcatggctctccgataaaccagctaaaacgtttggcttaaaaaatgccggggtacttgaaccaggtaagccagctgatattgcgatttttgacttagaccatgaaactgaattaaaagaagaagactataagtcaaaaggcgttaatacaccatttacgggcgacaaggtgtatggtgaaactgtaatgaccatggttgatggtcaggttgtatacagaagggatgaacaataatgcggtatttaatcctagaagatggtagcatctatgctggcgagggttttggcgctgattgcgaaacagttggtgaagttgtatttacaacagggatgactggttatcaagaagcaattaccgaccaatcttatgccgatcagattttggttttcactaatcctttaattggaaactatggtattaccttggcagattatgagtcacttgagccaaggatcaaaggcgtaatttgtcaccaggttgcccgtcatcctgataattggcgaatgcagacaaccttaccaaagtttttggagcatttgaacattccaggtattcagggaattgacacgcgtgaattagttaaaaaattgagagttcacggtacattacgtggtaagattgcagattcaaaagaaaatgcagaaaaaattgcggcagaattaaagattaagaatgtaactcaaggtgtaattagccgagtatcaaccaagtcaccatatccagttcctggttcgaaacgcaatattgtggttatcgactttggaattaaacacagtattttgcgtgaactagcagaacgtgattgtaattgtattgttttaccatatacagctactgcccaagaagtattaaaccttcatccagatggtgttcttttgagtaacggccctggtgatccagaagaaatggtagaggcaactaaaatggtgcgtgaagtagaaaagcatgttcctttgatgggaatttgtatgggacaccaagtctttgctttagctaatggggctaaaacttacaagatgaaatttgggcaccgcggttttaatcaccctgtacgagagattgcaactggtaatattggttttacttcacaaaaccatggttatgctgtgtctgcagattcaattgacaaggataacttaatgattacccacgttgaagtcaatgatgggacggttgaagggttacgtcataagaaatatcctgcattttcagtgcaatttcaccctgatgcaacaccgggtcctcatgatgaggtttcgttattcgacgactttatgtcaatgattgatcagagaaaggaagaagagcgtcatgcctaaaagaacagatattcataagattatggtgattggctcaggtccaattattattggtcaagctgcagaatttgattattctggtacacaggcatgcttggctctgcgcgaagaaggctatgaagtagttttagttaattccaacccagctacgatcatgactgatacaacaattgcagataaggtgtacattgaacctctgacagttgaatcgatttcacgaattattcgtcaagaatatcctgatgctattttgccaacacttggcggtcaagtgggcttaaacatggctatggaacttgccaaaacaggaattttggatgaattacacatcgagcttctaggtactaagctgcaatctattgaacaagccgaagaccgtgaaaaatttaaggaattatgtaagtcattaggtgaaccagttccaccttctaagacagttaatacagtcgaagatgccttagctttgggagatgagattggctatccgatcattgttcgtcctgcctttacgatgggtggtaccggtggtggtatctgtaataatcatgaagaattagcagagattgccaaaaatggattggaactttcccctgtaactgaatgtttgattgaaaaatcaattgcgggctataaagaagtagaatttgaagtaatgcgcgaccatgatgacaatgcaatgattgtctgctgcatggaaaactttgatccggtagggattcacactggtgattcaattgtcttttcaccaagtcaaactttatctgataaggaatatcagatgcttcgtgattgttcactgcgtttgattagggctttgaaaattgaagggggatgcaacgttcaacttgctcttgacccaaatagctttaattatgatgtaattgaagtaaatccgcgtgtttcaagatcatctgctttagcttctaaggcaactggttatccaattgctaagatggctgctaaaattgcagtaggaatgactttggatgaaattaagaacccagtaacgggaacaacctatgcagaatttgaacctgcattagactatgtagtctgcaagataccacgctggccatttgataagttccctaaggctgatcgcgttttgggcacccaaatgaaagcaaccggtgaagttatggcaattggccgtactgcagaagaagctatgcaaaaagcggtaagatcactagaaattgatgaaaaagatctttactcaccagaagcacacgtagctagtgatgaccaattagagcaaaaattagtcaaagctcaagatgatcgtctcttctatttagctgaggcatttagacgtggttattcagctgaagatgttcatgaattaacgaagattaatttctactttttagatatcgtgcaacatatggtcgaattggaaaagacacttgaggaaaataaagatgatgttgatgtattgcgcttagctaagaaatatggctttagtgatccaacgattgcctctttgtggaatgaaactgcagatgaggtaagagcatttcgggaaaagcatggcatcatcccagtctacaagatggttgatacatgtgctgctgagtttgaatcaaagacaccatacttttattcaacttatgatgctgaaaatgaatcacataagactggtaagaagtcggtgatcgttattggctcaggtccaatcagaatcggtcaaggtgttgaattcgattatgcgactgttcactgtgtcaaggccttgcaaaagatgggctacgaagcaattgttatcaattctaatcctgaaactgtttcaactgacttctctatctcagataaattatactttgaaccattaactttggaagatgtcttgaatgtctgcgacttggaaaagccagaaggcgtgattgttcaatttggtggtcaaacctcaatcaatttggctcatggcttagaagaacatggagtcaagattttaggcactaaagtagctgatgttaaccgtgcagaagaccgtgaactgtttgatcaaatcattaagcaacttcatttgaatcagcctcaaggtttaactgcaactactcatgaaggcgtacttgaagctgctgataagctaggctatccagttttagtccgtccaagttatgttttgggtggtaaggcgatggaaattgtctacaccaaggcagagttagaagaatacttgcaagaccacgttgatattgcagcagaccacccaatcttggttgatgattatcttgatggtcgtgaatgtgatgttgatgcaattagtgatggtaaggaagttcttttgccaggaatcatggaacatattgagcatgccggtgtccactctggtgactcaatggctgtttatccaccacaaaccttctctgatgaagttaaagaaaagattactgatgtcactagaaagcttgctttgactttgaactgtgtcggcattatgaacattcaattcattgtcagagatggtgaagtttacgtaattgaagttaaccctcgggcaagtagaacagtgccatttttaagcaagatcacgggtattgaaatggctcaggtcgctacccgagtaattatgggcgaaagtttggctgaacagggctacggtgatggtcttgccccagagccagacatgatctctgttaaagcaccagtcttctccttcagcaaattatcggacgttgatgcatatcttgggccagaaatgaaatcgacaggtgaagtaatggggagtgatcacacttttgccaaagctctctacaaagcttttgcaggtgctaagatgcaattgcctgaaaatggtaatgtattacttaccatcgaagatcgagacaaagaaaagattttaccaattgccaagagatttgcgcggattggctacagaatctttgctactaagggtacagctgatttcttgcgcagtcatgatttgcatgttgatccagtaactaaagtgcatgaagatgaagacgccaaggataatatcttgaatgaattaagaaatggcaagattgacttggttatcaatacgatggggcacgatattgaaaagaattctgatggcttcatcattagacaggttgccattggtcaaaatgtaccattgattacagcacttgatactgcagatgctttgcttactagcttggagaatagatcatttgctactgatgctttgaagtaggatggttgaatagataaaaataatgcatttctctattgaagtaggagaatgcattattttttatgcaaaaaataattttcacaagtgaactaataattctgagataaataagcgatagatagcattcaatcaagatattgtgaaaaaaatatgtatcacaaactttattatagagccatgagtaagaatatttcactatcttttgtaagcgaatacatttataatctgagataaggaagtgaagtgtttagggggaaataaaaatgtggatttcgtttttattggctttaattccaattatttggcttatttactctttggcaattcgaaaaacgcctgctattaaagcatgcagcattggactattaattactatcgtattggctatactgggatttaacctctctatagttgacactttgacgggtgctttagagggcattctgatggggctatggccaattgtttatgtaatcgtggctgcactgtttacttataatgtaagcaattattcaggtggaattaaaattattcaagatactttgtcgtcaatcactactgatcagcgtattttagttttgattatcgcatggggatttggcggattcttagaagcaattgcaggttttgggacagcagttgcaattcccgctgggatattaattggatttggtcttaatccgattaatgccgccataatttgtttaattgctaatactacaccaactgcctttggtgcaattggattaccagtgattacactgagtgacgtaactaatttgcccgttactccattatcatttgttattactttacaacttgcattattaattattataattccgtttttattggtgattctaacaggtggcggagttaaagctatcaaaggagtgggattaattaccctgatgtctggtttgtcattttcaattccgcaaattttggtagcaaaatttgttggtccagagttaccagcaattgttggttcaatttgttgtattttgactacagttctgatggcaaaattatatcatcatcaagataatgacataaaagagaatattgagaagcacagcgctatcgaaattttgcgtgcaagtttaccatttattttagtgttcgtatttgtggttcttgcttcatcactgtttccagatattcagcatctattgggaaaggtgacgtcttatattaaggtgtatactgggaaagatgcagaactgtttaagattaattggctttcttcaccaggaacattaattttgctagctacttttattggtggattaattcaaaaagttagtttcaagaaattaggacaaatcttaaaatcaacaatttttggattatggaaaacattaattacaatttgttctattgtggctttggccaaggtaatgggctacgcaggaatgacttcagcaattgcggcagcattagtagttctaatgggaccaatatatccattagttgcaccgttaattggtgctttgggtacgtttattacaggatctgatacctcagctaatgttctttttggtaacctgcaattgtcttcagctaaggctttaggcgtaaatagtaattgggtagttggttcaaatatggtgggagcaactgctggaaagatgatctcacctcagagtatagctgttgcttcagctgcaattggacaagatggatctgaatcaataattttgaagcaagtggctaaatggtgcttattgtatttgggaataatttgtatattcctatatggaataggctttgccgtaggatttttataaaaataatttaaataactcttggtgttctgatatatattgatttgcacttgtcatccattagagactgtaaaatagtttgtgtaaggatgaatgattccttaaatttatttctttaaacattagaaaaaggagttcctttctcgtatgattggtttgaacaaaaaaacacatacagaaagaagaactccttcatgaatgattttaccaaagattttgctcaagctctattcaatccagacaaaataaatgatttattgcgcaaagagctacaacaggctgttaataacttgctagaagctgaattgactgcctttctaggctatgatccctatgccagaaatggctggaatactggcaactctagaaatggtgcttatttccgcaaagttgatacgcaatttggcccaattgaagtgcaagtgcctcgggatcgcaacggtcaatttcatcagcacacgctgcctgactacaagcagcactcggatatcttggaaagcatgattatcaagctttactccaagggcgtgaccaccagggaaatagccgatctaattgaaaagatgtatggcagccattacagtccagctcaggtatcaaatatttccaagcagatgattccaaaggttgaggcttaccacaaacgcaagctaagcgacaagtttttctgcgtctatttggatgcgacataccttcctttgcgccgagaaacgtttgagcgtgaagcagtctatattgccattggcattaaacctaatggacataaggaagtcattgactactgcattgctcctagtgagaacattgaagtctggacagagatgcttcaaaacatgaagtccagaggcttgaagcaagttgaactctttctttctgatggtgttgttggcatgaaaacagccttggccaggacttatcctaaagctcattttcaacgctgtttggttcatgtcatgcgcaatatctgcgctaaagtacgcgtcgacgatcgtgaaaagatcatgaacgaattcaaacaggtgcatcaacagacaaacaaagaagaagccacagctgtcctgcatgacttctataccaaatggggcaaggtttacagccatgttatcagaagcttgaaagacatagaaccagatctgctggtcttttataactatcccaagcagatcagagcttcaatttattcgactaacatgattgaatcatttaacaatgtgatcaagcgcaaagctaagcctaaggcagagtttccaactgaacagtcgcttgatgcttttattggcattcaggcaatgagctacaatgaccgttatttcaatcgaattcataaaggctttggtcaggttcaggacaccttagaatcctactttgattaaataaataattaaaaaatcaatttacgagaaagaactatttacacaaaagatttgacagtttcatccattaatagtaaatcgcttgcattaaaagcgctttcgttgatagaatgctttttgtaacttttttacattaataagggagacaaaacgaatgagttatttatttctgttcattccggcaataggatggggtcttatgcccatgtttgttgctggtgtcaagaagagtaacatttaccaccaaattttaggtaccgttcttggtgcatttatctttggtgctgcagttactctcattaagcgtccatcttttaatgcgactacttttattttagcaatgttagctggtgctgcttgggttattggtcaagttggtcagtattacagttattccaaggttggggtttctgaaactatgccaatttcaactggtttgcagttgatcggtgtgccacttgtaggtgtgttgatctttggtgaatgggcaagcactcaagctaaattgtttggatttttagggatcttagctttagttattggtgtagcatttacatcattgactgacaaaggtacatctgaaggtggaaaaaagaatcagaccactacaatgattgtgctggtattgactacacttggttacattacttcaagttccattccaaaggccttgaagggtgacagcataatgattttctttgctgaaaccattggaatgttggttgcagcaattgtttatttaattgcaactaagcaaacacaagtctttaaggaaaaagaaagttatcaagtaattcctgccggtgtgatttacgcaattgctgctcttgcatacattgtttcagttaagatgaacggtgtaaacctagcctttgttatgtcacaactttgtgttgttatttctactcttggtggtatccttttcttacacgaaaagaagacacaaaagggtcttgtctatactgtgatcggtttaatattaattgttgccggtgcagttttgacctcagtattttaatgaattttaaataaatattgaatgaactccaacatgataattgttggagtttttgagtaaaaaaattcatgaataaatataaaatgaattaaacctgaattgtcaaattaagtgcaacagttaggttatgaagagatatattgcttgaagagttcctctgctgtgtgatattggaggattcggcgatatttgtggttaatggcatcagttgcctgttgaacataagcttttgacttgtctttcatgctcttgcccttagggaagaattgacgcaaaagaccattgcagttctcattggtgcccctttcccatggagaatatgggtgagcaaagtaaatctggcagcccttgatcttggtcatatccgcaaactcagagccattgtcaaacgtgattgatttaaaccaggcaggatgtctgtcaatctccttttgaagcagcctttggcatgtgcttgcccgatagtcaggaatcttgataactacttcaaagcgtgtggttctttcagtcaaagtcattaaagcaggctgattcttgcgtctgacgcctttaaccagatctccttcccagtgcagcggagcttttctgtcttcaacctccttaggacgctgttcaatggaattgccaagatgcttcttgtgcaaagcgtgaccgccatggctgtgatgacgcttgttcctgcgtcttttgagcttcataggcagatcaatattgcttatgtccagcaagccctgatcaatatagcgatagacggttggtgtgctgggacaagggtagcctggcatagtccttttgaattcaccaacgaactcatcgatgctggtggcatcaaatttagctttaaagcgtctggagagcattctcaaaaagacagcataatgcttcaatggattgcgctgatagcagtttttgcgacgcttctcataataaatctgtgcagtatcagcgtaatagtgctcatacaataaatagctgctgtctctttgcaggacgcttccgcgtttgatttcgcgactgattgtcgacttatggcagccaacttcttgagcgataacagtacgggaagttatgccggaatccagcattgcttgaatttgtccacgttgtacgctggttaattgatgatagtgcttagaaatgctagaatttgaattggtcatgaagatcttcctttcttgatttttcgtcacttcaagtttaggtcttcatggcctttttgtttaacacttagtgttgcacttcaattttaaatccgggaaaatgaattaaaatataagtagaagccaaagagaggatgatttctatgagtgataatacagtatacgtgatcgacggtcgtcggtatgcacgtaatggagaaattgtcgaacataatgtgcatgtttatagttcttatcaaaatctgattgctgcatttaagccatttttggaagtttcaaataaagaagtgcatatgaatggcaaaaatgagatgcttcaggttagaatatatgatccatcaaatcaatttttgacaaaatataaatttgatatttatgaaaagaaaatagataatttctttccaagtactactgaacatatttagcaaaggaatgatccgatgacttttaacaaagaagaaaaagagcaagctttaaagcggctaactgatgaggaatataacgtaactcaaaaggccgctacagaatatccttttaccggaaaatatgatgatttttatgaaaaggggatttacgttgatgtagtgtcaggtgagccacttttttcaagcttagataagtataatgcaggctgtggttggcctagttttactaagccaattaagaaattaacttaccaccgcgatcaatcgcacggaatggagagaacagaagttaaaagtcccgaagctgattctcacttaggtcatgtttttactgacggcccagtggatcaaggtggtttacgttactgcattaattccgcagcattgagatttattccatatgatcagttggaacaggctggctatggtgaatataagaaaatatttgaataaaaaatacggcagatacttaaaataaatatctgccgtattagtttatatattaaaaattatttctcatagaacttaatttcagtattggccaaatcaactgtataagtttcttcttcaagtggtcgtttagtcattccttcatcagttgagtagatgatcaaggccaacttactaccagatggaagagtgtagtaggtaggttgaagcaagaagtctaaatcgtagaacttgtcagcatcaatcttctcaggtcttttcatgtccttatagttttgtaagttcatgtgagccttagtgatcaacttagccttagtcttcttgtccggcacaaattcttgcaaagtatcagtgccaaatctatagccaagttcttgaccgccgcgcattaagaacttaggtgtagcggttaagcgtcttctttctcccaattcaactaaagcaacagaaatttgtcccttaggtaagctgcctttaactctaacttttacttcaggacgaccgacaatcgtagttgggtgaataaattcgtctgtttcaaaacgcaaacttggtttagcccatttttcatcaccacagatgaacttgtatagccagtcgctttctgagatgtcagccttcttaaattcaatgccaccttcatcgacaaatgattgttgtgctttgccattgccatcttggaaaagctcgccgtcatcagttgggtagtaggttttcttttgacctaattcatttgaccaatccttttcttcgtgccacttgtcagcttgcaagttgtcctggatcatgacggttggccattgcttgtaagcattgttttcaatccctagtaattcatgtacaaaccaaaggttcatcaagtcagtaaaatcaatagaaacaaagttgttcatattgtagtgaggaccttggtgtaggaaaagatgatgcttcattggcatttttttgactagttgccaaattttataaacattctttggcttaacgttccagtcatttaaaccgtgaacagaaatccaagaacatttgatgccgtcagcgtgatggcggtagtttcttgcttcccaaaagttggaatattgaccggtttcacggtcttcttttgttaaaagctctttttgcatcttgtcgtattccggtttgatcttcaagtaagaacctgcatcccacaagtttgattgacaagtttcagccagtaaatcaaggtcttcaccttggcaggcttcgggtgcgattaccaaaccgtgttcacggtaatagtcataccaagaagaaatagcagcttcagaaaccacagttttcaaacctttaaccccagtagtggcaatagcaatttgcaaagtgcctaaatatgaacgaccagtcatcccgatattgccattgcaccagtcagctttggtttgaacagatctagtacggtcagtgtaagcaatacgatcgccgtggagccattcgataactgcagcagctgattcagtttcttcaggtgcaccagtaatacgaatcccatcactaccacgggtaccgattgctccagcaaaaacactggcaaaaccacgagcaagcatatactcatttaatggataagaagatttatgtactgcttcttcggtagctgggtggttagagtcgtctggctgctttgctttaactattggtgaatgaacatattgtggatcattccaatcggcggcatcagataaattttcatcaacattatggttacgcttttcattagcgataattccgccgaaatatggtgaagcagtataaagggcaggcacttttaagcctttgttagtttcagctggtcggaaaacagtaacttgaatcaagtcactcttaccatcatgatcagtatcaagatcagtttcaacgtaaacaacttcacgaattactttgttggtatcgaagacaggaatagctttgccattgaaaaatttaaacttattttgtccccagaattgagtaaagtaccccttaccagccattacatcgagcaaaatttgaccgtttttggcgcgagtattgagcaaacgataaaaagcagagattaactttttgacatcagaaatgtcttggacaaaaggtaaagcattcttttgcataaagccggttggatcggctaattcgtagtcataatgaacatgatagccaagtaattgtaaggctacattatagaattgagcagtaccaattgattcaggctttccttttaaaaagtcagctaaagtttgctcatttgaaacagcaaattcagataattttgttgtcttagcagcgtcagtttttgcttcagcaattgtcattttaacgagcttgcccagcaaatcgttaaaattccagtctgcataatttttaggtaagaaattgatgtcgattaattcttttacttgttgatcgaagtcagtttcgacataagcgtattggttatatttcatatttttctcctttgcagtttaattactttctattttacttttaattgtggctataaccaatagatatggaagttaataagcgaaaaatatttttattttggtattcttttctttaaaatggacttaaacaaatcggtgatgctaaatgagaaaaaagttttcacttgtcttgctacttacaacgatatttacaatttcgctgacagcttgtactaatcagaataaggttgatcatactaaaagtcagactaaaatcacctcaacaccgacattatttttccacggtggtggttcgtcatatcatgctgaagaacacatggtggcagcagctgagaaagctggagtcacgaactcagtgattagagctgaggtggcgcctaacggtaaggtttctttgagtggaagttggaaaaaaggtgccaaaaatccaattgtagaagtcaattatgaaaataaccgtgagttgaacttttctcgacatggtgtttacgccactaatgtagtgaaggctctgcaaaagcgttatggtattaaaaaatgagcatgttcggtcattctttaggaaatatttcgatcatttattatatgctgcaaaatggacgtaaccggaagatgccacaattagtcaagcaagtcgacatggcagaacattttgctggtttgaactttagccgtgttcccgcctcaattcgtcaacctaaaggtttaaaattgaattctgccggaaaaccgaacaaaatgaatgctagctatcggaaaatgacgggtgtaagagaaacatatccgaaaaataaagttcgtgttttaaacatcattggagatattggtggtcaaaccgatggaacagtacccaatgtatcatctttgtcattaaagtatttagtggcagatcgtgctaaaagctatcaggtagtgaagtttactggaaaaaatgcacgtcactccaagttgcatgagaatccaaaagtagataaagtattaatcaaattcctgtggaataaataaagttagtaataggcatgcgaacgtatgtctattttttgtgccttttcttaatccaattacttgaattataaaataatgcgtgtataatattcatctaattaataaagaaagggcatggttttatgaagctattaaagactaaaatcttaacaattctgtgtggcttgctaacattgaacggcttagccatgttgttttcaggattgattatccaaatggacgaagttgctgattttgattcagcccaaagtttagcagttgctaattcgactaatgccattattttggcaggaattattatgattttgctttttggggcattgtttttcgatggttgggctaagctcaagaacaggcatgctaagcacgttaagttagtttaatagaatagataagactagctctgaagtgagctggtctttttttgcccaaaattaaagtcttctttaccgtttttttacttttgcatgtgataatgagccaaaattaatcagggggatagttatgggattctggtattattatgttttgccattagtgacggctattttattcgtttggctaggaaaccgagttatggtgactaaaaaatggattagcataattttttactcattagctggagtaggctatttaattgcatcggtttttgctgttttttatatctatgcaacagtagaagaaattttaacgccagatattttaacaaaaataggttggcattatttttggagtgataattttatttttcttcttaccagcactgttctattaacaattagctattttgtactaaaacgtggtagattacggatgaaataggatgctcaaaaatgataagattatttttggaaaaaatagaataatgatggggtgaaaaaatgactttaccatttaaggcagttgctgtagatatggacggcacgtttttagatgatcgtaagcagtttaatcacaaggaatttgatcaaattttgactgaatttgaacaacgaggagtacattttatcgtggcttcagggcgtccttatgttagattgaagcaggactttggcaagtttgccagcagaatggatttcgtaactttgaatggctcgagattaatcatcaagggtcaagaagctggcagttatttgcttaatcgcgatgacgttttaaagctaattcatgatgtacatgtgaaatatggtgaaatggctacaatggtttttggccgagatattgcatatttgcatagcaatgttgaaaaagatgaacgcgactttttggcttactttgctggtaatagcactgtaattaatgactggaatgacttaccagataagatttatcagatcacatttggaatggacagttctaaggctgcagaaattgaacgagattttaattctaagcacgataaccagatttctgctttttcttccgctacttttgccattgatgttaacacacaaggtgttaataaaggcgccggattaaagcatctcctagaaaagatggggatgacaggggatgacctgattgcctttggcgatgggggtaatgacatcgatatgttgaaatttgccaaatattcttatgcaatggcaaacggtatggacaaggtaaaaaagcaggcgaaatatattgcaccggccaatacggagaacggtgttttcaaaggtttgcaaaaatatttagctgaagataaaaaatagcttgtaaaattaaattaatatgatatagttttaattaacttatagaaatagaggaaattgccatatgattcgtttactgaatctctaatatttgatttgttgtttagcaaaatactgtctttgcaccttgtttagtgcacccattttttgcttgcataccaagtattagcagtagatgaattgagggtggttttctttatcgaaatcaacctttatttgttgcactgttaataggatgtgagcatccagaacaatgctttttctttgcgacaaatcatgttagagatttttttgctgattatacgtttttgtcaaaaaagaatgaggaaaataatgggtttaagagattatattaaagctaaccgtcagcgggcaatgttagttctgtttttgattacgctaacgcaactgacaactacaatgtacacctacttaactagtccgcagttaaatgcaattgcaagtggtaaattcgaactgtttttggaattaatctttgtacaatttttaattggacaggtctgcaatgtcagttttaattggggaagtttacaaaataccaaacaaacacagacactttttcatcaggtaagacagcgaattatacgacattattatcagcagcctgaagacaaagtttcagagatggaaaatcatttgggaaatgacttgcagttagtgcaagagagttactataatgtttacttctattttgtttgtgacttaatttatattattttaactattggtacgctgtttacctttcattggatattggctgtctatacgttattagttactttgcttgcagtagtagtgccgaaattgactgaaaaatataccaatcgagcaactaaagctgtttctatccaaaataagaaatttttgcagttgttagaaaaatggttcaagggtttagatgagctgcgacgctaccagaataaagttattttgaaaaaggtggtgggacaacagagtcagaaactagagcagagtgaatatcagcgagataaattgctacattatattagcttagtgtctgcgatatttaatatagctggtcgtgttggtgttccatttattgctggaattttgtttttcaatcatcaggtaaatttaggagcgattctgacagcgggatattttgccaatggaattttttatagtgtagatagttgcgtgaacagatatacgcaattaaaatcaacgaaaactttgcgggatgatctggctaaattgcaaaagtgtttaccagaaaaagggtatgattctttaaaacaaatcgctaccgttcaaataaaaagcttgtcagtacaatatccaaatggtgaaagaattacttatcctgactttgaactgaagaatggtgaaaaggttttattgactggtgattcaggtacaggaaaatcaactttattaaaagttttgttagggcaaattaagccaagtacgggtgaagtaatctattgcgataaaacaggaaaaaagatcaaacctgatttacgtcaattaggttatttggcacaggacttattgatctttcctggcagtattcaagaaaatattactatgtttaagcctaagcttaataaaaaagctgtacaagtgattcataagacggtttttgatagtgatcaagcgcgtttgaaaaatgggatagagacacagcttgatccacaacaggaattgctgtctggtggacagaagcaaaaggtagttttaatgcgagcgttgttgcgtgagaagccgattctgtacttagatgaagcaactagtgcaattgatcaacaagcaacgaaaaaaatcttccaaaacttaatgcaaagtagagcaacaattttggccgttgcacacaatttaaccgtagaacaacgagcattgtttgatcgtgaagttcacttggagggaaaataatgagtagcaaagaattatttaaacttaatccaattaaattctgtctggctatgggactacagattattgcagcagttggcgaagtagttgtagcttatgtgttaactttgcaatttgatgctgccaaaaatagaaacttgagtttatttttgacttggacattaatccagctgtctagctatgtcatggtattcttattctataatttggcgggaatcgtttggcaaaagttgattcaaaattacctgcatttaattcggcgagaactaacagatcattattttgccgatagtcaaaagcatgcggttagtgcagtgcaaaatcggatgactaatgatttgaaactgttacataatgactatttagattcgttccgctatatggtagggatgctagccggtattgtcggtgtagcctttagcttggtgacttttcagtggagtttgttagttgcttgtttaatttttgccgcaattcagatttatttacctaaattactggataagccattacaaaaagctactgaaaaggtatcagtagctaatcgaaagtatttgaagactttaggtgattggttaattggcttatcagaagttcgtcgctatttggctagcgataagctttttaagactattgctgaaaattcaggacgcttggaagcagcaaatattgagaaggaaaaagtagatcaggaattagattatctgaatcaattggcttattcattaggagatgtgctaatctttcttttaactggatttttggtagtgaataattgggctgcttttggtttgattgccagcattggcaacttcaatggagcactatttggttctttgcaaggagttgctaattatggtggaagaatgcgagcaacaaataaattgcgagaagagatttttgtagctagaaagaaaattcagtctgaacagaaaagtaatttagaacaagcggttagtttttcaatccataatttagctatcgattttagaaacggtgaggccgtgactttcccagatttccaagttaaagctggagagaaaattttactaacaggtgattcaggtacaggaaaatcaactttactcaaattgattttaggtgaattgcaagccagtcgcggcaaatactttaatcaaaagggtgaaaagattcaacctgatttagctgaaattggctatttgccgcaagatccagtgttattcccagtaacgattgttgaaaatattacgatgttcaattcaaaactgctaaaccgagttaaatcagctattgaaaaagttcaatttgcaggagatatggctaagttttcggctggcattgagactaagattgaccttgatcaattgaatgtttctggtggtcagaggcagaaaattgttttagctagaagcatggtgcaccagagcaagttgattttgattgatgaggcgacaagtgcaattgatcaggcggctacgatgaaaattttgcgtcagttgactaagacggatgcaacgattgtattcattgctcacaactttaatcaagaaatgcatcaattgtttgatcgtgaaattcatttaaagaaataaaaacaagctcataacctcaaagttacaggttatgggcttgttttattatagccaaatttgttcgaaaatatcttctttaaaaccgcaagttaaattactgtcatcaacgactaatggccgcttgattaacttaccattttttgacatcatatctgcagcttcttcaatcgtcattgttggcactttttctttcaaattttctcttcggtaatcttgaccgtgtgtattgaagaaatattttagaccacgatcttgatatttggtcatccattttaccaagtcttcttttttcggtggctgttcaactaaatcttgaaattcgtagttgacctgatggtcatccatccacttgcgtgctttacgtgaggtagagcaacgtttataaccataaaatttaatcattattttccgtccttatttttgtaaaaattttctaaaaaattcaatttcttcatcatttgcgatatcagctagctcgtctttttgatcaacaaagaacacatgaccgcgaggattgtcttcatcaccataggatttgcagatggcgtgaacaccgcgaccgagcaagaagccaaagaaggtaaattgcatgtcatgcaaaaaatccttgttagccgtgattaaaaaagtcggcaagaaattgtgattgatatatttttcaacgtcgagttgttcatgatacttgttaactgcatttttagtgaagtaggcgctagccatgccatctaaattgcttggggctaacatgaaggaagcagcacaattcaagccgacagccctaaattttaagttcaatggtttgtaagaaaataacttggcataatctggattagtcaaaatagtgacatactgctcagccatttgaccaccggcgctgtcgccaacgataaaaacgttgttgcgatctagacgatattcttcagcgtgctcatcaacccaatgcatgtagcgatcaacatcgtctaattcatcagggaattccgcgttttctggtgcaagacgatagttgggattgatgaaagcaaaaccgcgcttagctaaacccattccataatattggtagatttctttagtaccataaacccaaccaccgccgtgaatattgatgatgacagggaagggagcttcgtgctttttgggtaaataaacatctaaagtatgcatctggaccataaggcagattatcaagacgttcaacttcagggatgtcgtgaggcaagccactgtcacgtttggtgtcatgctgatatgcaccatctctaaagtcagtaacaaactttttgattttatctttaagttccataattgttctcttttctagtaattatctatgttaactcaattatactttaattgaatttgaaaaaataaaaacttttttgaaaaatcctcttgcattttaattaacgtttccctataatagtttatgttctgttgaggacatacaaacatacaagatggtctggtagctcagctggatagagcaacagtcttctaaactgtgggtcgtgggttcgaatctcacccggatcataaattatgcctgtaagcattggtcttacaggctttttacataccttaggtatctatgtgctaaattttactacaaagacaatatttttttacatttgatattgtatgatacaaatatatgacaattattaacttaatcttacattattagtgaatcagttgactaaagtttggaacgagcttattctaaaattgatttccaaaaaataggatcgacaagtgtgaacgacaactatttttaacattatcggaggaattaagattgactacaaccaaaaaaatcattgttagattggcatgcgcgactgttcttggtacggcaggggtagcgctgacacaagtaaatataccacaaactgcagttgtgaacgctgcaactacctctgttgcagcccgcgcacttggagttgatgttgctagttatcaaaacgctgacttgtcaagtcatgcgcaagctggagcacaatttgcaattgttaaagttagcgaaggtacttcctatcgtaaccctaaggcatcaagtcaaatttcaacggctttatcaaataatatgatgccaatggcatatcactttgctacttttagttcaaatgcaagtgctgctgctgcagaagcaaattatgcagttcaagctgcccaagcattcggcttacctaaaggttcatatattgcttgtgattatgaaacaggttcgggcaataacatttacggtggtaaaacgccaacggctaatgcaattattgcttttatggacactataaaaaatgcaggctataagccacttctttatgctagttcatcagttttacaaaataatattgatactaatagtgtaattgccaagtatcctaactcattgtgggtcgcttcatacgctatttcaggtagaattgatagtccaaacttcaattacttcccatcaatgaatggcgtttcaatttggcaatttactgataattggaagggattaagcgttgatggaaatattgctgttttaccattatcaattgacggtaatgtaacttccaacaatggcgcaatttcacaagctccagctaccagcaacaccaattctgctagctcttcaaatgcttcatcaaatacttcgaataagagtacttcatcagatgatgataagggttcagcaactgctggctatgtgatgaagaaatcatatatctataataaaaagggtgagcgtcaaagcggctactatgcagcttatactaatattactcattatggtgtagtgactcttgataatggtaagactgccttaaacatgggcaatggtcgttacattatggcaagtaatgttttaggtaattcacgtgtacttaagcacaatgcttatgtatataataacaagggaaaccgcgctaactggagagtgcttagaaaaggtacgccaattaagacctatggttcacggatgcgcgttaatggtaaaagctgttaccgaatcggacgtaacatgtacgttaaggcggctaacttttaattaaaaaattgaatttatcaagaaggaattaagcttaaaggtttaattccttttttcatgccgttttttgtataattaaaagtattcaggaaacgcctgaattaattaactgatagggatgaaataaacttgaaaaaaagatttatagcaataatattgatgctactgactttaacgggttgtactataaaaagtactacgcctaagaaggctaagtcgtcagttaaaacggttaaagtcgataaacagcaatctaaggaaaaacaggctaagtatcaagtgatagaccaagtttggcgaattcaacaagatggcgttgatatttatggtcatatatatctaccacagggtttagctggtaagaagaaagcagtaattttggctcacggattggcaggaaattaccgtgatctaaccagttatgctaaatatttagctagttgtggctatgttgcctatacttttgattttcctggtggagctaagaatggtcaaagtagtggtgtagatcaattaaagatgtcaatttttacagaagaaaagaatctacagctggtattaaatacaattaaaaataggactgatgttgaccgtaaacaagtgtctttgctaggcgagagtcaaggtggagcagttgccgcaatgctcgcaagtaaatatccgcaagaagtaaagtcattgattttgctttaccctgccttttcgatcactgattatgcgaaagcggcttttaaatcagaaaaacaagtgccagacaagctcaacctatttggcttcacaattggtaaggcctattttgaaaacttgttcaagtataacttgttaaaagaagcaactaagtatcatggtccagttttaataatgcatggtacaagtgacatgattattccagattcttattcaattatggctaataaaaaatttaagcactcgaaattatacttatttaagggtgcaggtcatgattttaaaggtaaatatcatagtcgagcagatactttaattgataaatttttcctgaattgtcaaattaagtgcaacagttaggctatgaggaaatatattgcttgaagagttcttctgctgtgtgatattgaaggattcgacgatgtttgcggttaatggcatcagttgcctgttgaacataagcagctgacttatctttcatgcttttgcctttagggaagaattgacgcagaagtccattgcagttctcattggtgcctctttcccatggagaatatgggtgggcgaagtagatctggcagcctttgatcttggtcatatccgcaaactcagagccattgtcaaacgtgatcgatttaaaccaggcaggatgtctgtcaatctcattttgaagcagcctttggcatgtgcttgcccgatagtcaggaatcttgataactacttcaaagcgtgtggttctttcggtcaaagtcattaaagcaggctgattcttgcgtctgacgcctttaaccagatctccttcccagtgcagcggcgtttttctgtcttcaatctctttaggacgctgttcaatggaattgccaagatgcttcttgtgcaaagcatgaccgctatggccgtgatgacgcttgttcctgcgtcttttgagcttcataggcagatcaatattgcttatgtccagcaagccctgatcaatatagcgatagacagttggtgtgctgggacaagggtagcctggcatagtccttttgaattcaccaacgaattcatcgatgctggtggcatcaaatttagctttaaagcgtctggagagcattctcaaaaagacagcataatgcttcaatggattgcgctgatagcagtttttgcgacgcttctcataataaatctgtgcagtatcagcgtaatagtgctcatacaataaatagctgctgtctctttgcaggacacttccgcgtttgatttcgcgactgattgtcgacttatggcagccgacttcttgagcgataacagtacgggaagttatgccggaatccagcattgcttgaatttgtccacgttgtacgctggttaattgatgatagtgcttagaaatgctagaatttgaattggtcataaagatcttcctttcttgatttttcgtcacttcaagtttaggtcttcatggcctttttgtttaacacttagtgttgcacttcaattttaaatccgggttgataaatttttgcagaaaaatgggaaataaataatgaagaagaaataccttggtttattggctttattaagcctattgagcgtttttgctatttggggtcaaagcgttagagctgatgttgattatgatattgataatgttagagccatagcaagagttaataaagatggttcactgacaatgtatcgaacaattaagtattcatttgatagtgatgctcgtggcctttattataagcaaaatctggctgtaaaacagaagttgagcaacattcaggttaaggtcgatggacaaaatataaaggccgcaacaacgggcaaaaataatacgtataaattgcaaaagcagggcaattcttataattttaaggtttatcatcgaattaaggaaaatgataaggttaaagttgagtattcttatctaattcaccgggcaattactaattatcttgatacagctgagctgaactttaaaatagttggtaatggttgggatactgacttagatcatgtgcgtgctgaagtgatttttcctggggcagttaaggggctaaaagcttgggctcatgggccactaagtggttacactcaggttttgccaaaagagggcaaaattattatgactgctgatgatgttgcaggagatagtggtgtcgaagtacatgcgatttttccaactacggtaactagtgctaatcagaatattgttaaagaaaataagaaaagagcaattgaaaaacaagaagcagcattagcaaaagaagctaatcagaagcgtcagcgtaagcagatgcttagtataggattgatgatcatttcagtacttgtcggttttgtggtgataattagaggcttttttattaaaaaagttggggttaagccaaaaatagagcgcgatttagtacataattatgaaattccagatatatcacctactgctgcgcaaattttggatgaagctgataaaccaaatgttaaagcatttacagcttatttgatgcaattagccggtaaaaataaaattaagatcgaaaaatatcaaactaaacatttaaagcggactaattatcgaattactttagtagatgatagtgttttgactgatgacctattagattttatttttaacaaagttggtgatggtaagtcatttacaacgaaagatttgcgggattatacttctaaaaaattgggtaggcgttttgataaatggtgtgacgggcaatataagcaagttgaggataaggacttgcttgataaaaaatataaaaagcagcgtagcaacttccgaacggggatgctcatgggaatgattgctagctttgcgatctgggtaattagcttaatgatggcaaataatatacccagttttgtgataataattggaatcatgatgatcgtcttagaagttgctgcattcatagtgggcaattctcgtttaagtatttatacccaaaaaggtgcacttgagacagatcaagttcgctgctttaagaaaatgctagacgatattggtcaattcaagatgaaagacgtcggtgatctgattttatgggaagacattatgccgtatgctgtagcgtttggtctatccaaaaaggtattgaagcagcttaagattgaatttgcagatgaattagatgctgcaccagttctgttttatagtggattctatagtagcagtagtgacagttttgagcatagttttgaacgtagcttctcttcaggcgtgtctactggtttatcttcagtttccggaagctcaggtggattttcaggtggatcgtctggcggctttggtggtggcagcggcggtggtgctttttagtgagaaatttttatactataattaaactaaaaaaggagggctaaattatgccatttgtacatattgaattaattaaaggtcgctcagatgagcagattactaacttaatgaaggatgttactgaagcagtgcacaagaatactggtgcgcctaaggaacacattcatgtaattatcaacgaattaggtaagcatacttatggccaaggcggcgagtggagagcttaataattagaaattgtagtaaaaggcgactcgattgtgagtcgcctttttatatagttaaatatataaacttgtattagagccttaaagctatgtgtgcataaatgaattatttatttagaatcccacgtaatataatgatgttgatgtctagatatttacgaggaggatttgaaatgaatttaaaaaagaaaattgcaatttctgcaactgcactgactgttgctctctctactgcatttccaattgctgctgcgcaaagtcagccggtaaaagcagtaggtattgtattggttcatcgtgttacagcaggtgaaaatttcgctaattggttcaattggcttagaactcgataaatagaaaaattaggaagcaggcaatataaagattgtctgctttttgcgtaaaaaaatttaatcactaaaacgatcaatcaattaacactacttcacgcgtggtgctagttaaatcgttttagttaataaaaaagtccaatcttgttagactcgacttgtaaatagtaataatagaaaagagtctgatctgattgaactgccttaagcttaagcgttttggccaccatttacaagttagttttaaagatttagtgataatttgtcggcactggtatcgtttgtatgcaccggctgagtttactcatcggcgaaatattgatcaaattaaaactacggacagtctgattttggctttacttatctggcaagctaagacaggaattgaatcacaaagaagattctgtgaatgtttcaattgtttatcacactcacgttttaatcggcgttcacgtcagctattgcaattgatttatcagatacggcaagaaatgaataaaaaggttgacctgaatggacagttcttgatcattgacagctttccggtacctgtttgccaaccaattcgaaactatcgtgctaaaatttttcgcggttatgccaacattggttataaggccaccaagaaaatttacttctatggtttcaaagttcatgccattgttagcgatgacggttacattcttgattatgtcgtaacaaaggcatcagttcatgatgccagggagacagttgaactgatagaaaatacccatccatctaattactatcttcttggcgacgaaggctatttaggcaaagaactgcatcaacagctaaaacaaatgggttacgaactttggacaccatatcgtaaaaatatgacaggagctaaaaagcacaatgatcatcaattgatggctattcgcagaacaattgaaagcgacttttcgcttctgacctattacaatgccgagaacaatcgagcacgtagtctgataggctttcaaagccggttggaaattgcaattttagcttataatttggcttattgtctagaacgatttaactagcaccacgcgtatccttcttaaaaatcagtataattatgttcgttactattagtaagttatacaataaaagtggtgagaataatgtatgattatcgaaataatatcaaaataattttaaataaaactgaggctgatgataaaagtctcgaaaatagtttaagtgcgattaaagctatcctaaatatggccgaagataatacagctgaaaaatctgagactaaatcagtaactcaacctaagaataaaattgcaaatacacaatcaattgcacaaagaaatgcagatttaaagcaaattaagcaattattgattgggctgacagccttaattgagactccaggtgatgaaaaagctaaaaagagttcacttgatgctttacacaagttgacgtttgttccaggcgttggcaagcgctatggcaatgttttgggtaaattggatcaggcaattcaaaaatctaagacaactaaagaagctgttaacaagaaaatttttgaagaagcaatgaagcccaaagagcaacctaagcgcgattatcgtaaaggacgccgctatactgttattcgggctttatcaggctgtaatttgattaatgatagtggtcaaattgtttaccgtattaaagaatcacaaattcactctttgaatttaaagagcggtgacatagttgaagctattgaaaatcgagataatccaaattatgaagcagaagtcttgcgcgtggtgggttatcgcaaattgcgcatgcgtgattatgacccaatcgaagaattccggtatgctgtggtccgcggcaaggccaatcaattagctatcactagaaatattaagggcgaaaagttgagaattcgcggtaaggatatcacgattccggttgattcaagttattatcaaggtgaaaatattcatgttgaagatggttcaattgtagatctagcttggtatacgggtgatgttcgcattaagaaaaatcctgctgaggcagtacagattcgttggatttatcaagttgatccgcctaagaaatcagatctgtcgtatcaaaagaaaaataagtcaaagaaagaagaaacagaagagttaactaaactcgacatgaatttgcactatcagcgggtgggaattgcgattggtgataatcaaaatgaaggaatattagaagggattgtttcgcgctataatgggatcccaattccaatagatgcttttgaaggcaagaagaaggtaatggaacggcaaatcaaagacttagatattgtaatcttgatgacagcttatgctgctcatgatgctacttggaatattcaggaattcgcttcaaagtatggtgttaaatttgccgtttcttcatctaaaggctaccgctcttttgagcgagcattatatcgagctgaaaatggtttacctgcttatgaaggaacgcaatcaatcgattataaagaagttaaaaataaataatttgttaacattattttgtttgcttgagctaacagatgatttttcgttaaaatagtactaactaaaagaaaggacgcttaataatgaaaaacattaaacaacgttcctggatgagatggttggtatttttagcaggacttgaaataatcgcaatatcaatcaatcttttttatggaccgattaatattgcagctggtggctcaacgggtatttctattctagtcgatgcggtctgggggattaatcgatcaattacagtatttgtagtgaatggcttgatgctgattttggcggcaatctttttaggcaaaaagactacccaaaatattgcattaggtagtttgctcttaccagttttgatggaagttacgcctagctttaaagcagtgaataatgacctactagccgtaatttatggtggtgcattaatgggacttggagtttcgctactttatcgcgttaatgcctcaagtggtgggacaacaattccgccgatgattctgaagaaatatttttatttaaatcctgcaactacgcttttatgcattgatatggtaattattttcttgaacatttttgtcgatggttggaatgctttcttcttagcagcattttctcaagtggtaactgccattacgatgcgctacgcggagaccggttttgataaaaagtatcaagtcagaattatgagtaattcagatttagaccgaattcaagatatgcttaaagaagattatcaaggcctgacgatttatgatgttataggtggatatagcgacgaaagcaagcgtcaattattaatcgtagttgatccacgtgaatatgggccacttatttctaaagtacatgagatcgatcaggatgcgtttatcattaccgaaaatgttgcaaaagtgcatggcggtcaatggcgaatgtaaaaaaataattgatcttagtctaaaagcgttgtatgatataagagttgtatttgtggagacctccacatctgcaaccgcacggcttgaggttagaagtcttcttatgtaagaagcaccccagttcggcgagtctaagtatttttttcggaggtgtacaaatgtacgcaattattaagaccggtggtaagcaatacaaagttgcagaaggcgatagcgtatttgtagaaaagcttgatgctgaagaaggtagctcagtaacttttgacgaagttatccttgttgctaatggcgacgacgttaaggttggtactccattagtagatggtgctaaggtaactgctaaagttgaaaagcaaggcaaggaaaagaaagttgtaactttcaagtacaagcctaagaagcactcacacagcaagtatggtcaccgtcaaccttacactaaggttacagttgaaaagattgaagcttaattcagaggtgaaatgaatatgaacattttaggtatgaaattatacgctcaccacaagggtggtggttctactgccaacggtcgtaactcagctggtcgtcgtttaggcgccaaggctggtgacggtcaaactatccacgcaggtactattatttaccgtcaacgtggtactaagattcacccaggcaagaacgtaggtcaaggtggagacgacactttatttgcacttgttaacggcgttgttaaatttgaacgtcttggcaagtacaagaagcaagtttctgtatacccagctgaagaagctaagtaattcagagattaacatgaaaaggcgagtagcataagccacccgtctttttttatggctttttccgcccagaaacatgtataattaaaccaatatcatacaaaaagagggtctctgagatggaaaataggcaagaattattatccttaattaaccagcgaattgagcatgtaactgatttaattaaagaagcaaatgcagatgcattgattatttttaatcaagctaattatcgatatctaaccaattttacaggggaagaagcacaattaattttgactgctagtggcgaacgagtacttttatcagattctcgttttgctggacagattaaagcacaagcacctggcgaaatggatgttgtaatgaaacattctagtgattatgaagaacttactaaggccttgaaaaaaatggacgtcaagagggtcttagttgaaggtgaattcgtttcagcgagtgaatatgaaaaacttaagcaactaaatccagaacttgaatttgtgatggttgaagaattggttgaacgagtacgtaatattaaagatgatcttgaaattgcggcattgcgcaaagcaattgatatttcaatggaaagctttaaaggtattttgccgatgattaagcctggcgttaaagaacgtgcaattggtgctaaattggactacctatttaaagttaatggcggcgatggccctgatttcgatacaattgtagcttccggtgtgcgttcggcttgggctcatggcgttgctagtgacaaagaattgtccgaaggcgatatgattgtcattgactttggtagtttttatcacggttatgcggcagatattactagaactgtttcattaggtgaagttgatgctgaaatgcataaaatctatgatattgtacatgaagcacaacgccgtggcattgccgcggcagttgcaggtaatactggatatgatgttgataaagcagcacgtgattatattacagaacaaggttacggtcagtattttggacacgggatcggtcacggcattggtcttgaaattcacgaattgtgtcaaccagctttaccttttagaactactaaattggtcaataatatggttcataccgtagaaccaggaatctacttgccagacaagggcggtgttagaatcgaagacgatattttggtccatgatcaaacgcctgaaactttatccactttgccaaaggatgaattgatttccctataatagctatttaatttatcgtatttatggtaaaaacgcttcaagattggtaagataataattgtagaaatgagggacttaatatgacaatgatttcagtaaacgaattcaagaatggcttgactattcaatacaacaacgatttatggcgcattgttgaattccaacacgtaaaaccaggtaagggtagtgcctttgtacgttcaaagcttaagagtttgagaactggtgctgtacaagaatatactttccgttcaactgctaaggttgaaactgcagacattcaaactaagtcaatgcaatacttgtacaatgatggctcaagttatgtattcatggatacttctacttacgatcaattagcaattccaaatgaacaaattggcgatgaagctaattacttattggaaaacatgattgttaacgtagttatgcacgaaggtgaaactttaggtatccaattgcctaatacggttgatttgaaggttgctaagactgaacctaacatcaagggtgatacttcatcaggtggtggtaagccagctactatggaaactggtttagtagttaacgtaccattcttcattaacgaaggtgacgttttaactattaacactgctgatggtacttacgtatcacgtgcaaataagtagtttatttgaggtaacaaaatggcagatagttcaaaaattcttttaagtggtgaagaaaacagcgagcaaattaaaattgatccaagtgttctagaagttattttgggtattgctgcagaaaaagttgatggtgttgccggaatgcgcggcagtttgaaatcaggcttaaactgggttttcggtcgtgaagatcatggtaagggcgtaaatattagtgttgatgacgataataagctaattgctgatatttatgtttatcttgaaagcggcgttaacgttcctaaggttgcaatgacgttgcaaaagaagttgaaggcacaattattgcaaatgactgatcttgagctgaaggcaatcaacgttcatgttgtcggtttagttttcccagaagatgaaaatactgaccagactacatcagagctgtttccggaggacgaagaagaaaaataatgaaccaacacgaaagtcgaaaagttgctatgcaagccgtttatttggctaatcaggagccagatttaactgccgaagaagttgaagcaaaagtcgttgcaacgcttaatttaaaacagctttctgcctattctaagaagttaatcgaaggcgtactagaagatcgcaaaaatttacagtctgaactaactagtcatttgaaaaagggctggcgtcttgaacgtgtgagtcaaactgtggtagccatcatggaagttgctttatttgaaatcaagcatagcgatgaaattgatgctaaggcagcagttaacgaagctttaaatttatgtgacgaatttgctgagcctaaagaaaagccatttattaatggaatgttagcaaactttgttaaatagcgatgaatagccggcagtttggccggttatttttttacaaaaggagaacgggctttatgggaaagattcttgatggtaaagcatttgcaaatgaattagggcaaaatcttaaagaaaaagttaagaaattaaaagaagagggaataacgccacatttttgcgtaataaatattggggatgatcctgctagcaagatttatgttcgaacaaaaaagcggcgggctgaaaagatgggaattatccaagatatttatcaaatgcccgctgatactaaacaggaagaagttttagcattaattgataagctaaatgctgatcctgagattaacggcttgatggtacagttgccagcacctgaacagattgatgcagatgccttgttaaaaaggattgaccctaataaggatgtcgacgccttaacgcctgcgaatattggtcaactttggatggaaaatcactttgttgaaccggctactgcagaaggcattattgctttattgaaacattatcaaattacgctggctggtaagagagttgtagttattggtcgaagcaatatcgtaggcaaaccagtagcggcattaatgttagaggaaaatgctactgttactgtttgccatttgtatactaaaaatctggctgaaattacacgacaagccgatatagtagtttcagcaacaggacaagcatttttggtaactgcagatatggttaaagatggggcagtggtcgttgatgtgggcatgaatcatgttaatggcaaattagtcggagacgttgactttgataatgttaaagaaaaagccagctatattactccggttcctggcggtgtaggtcctcttacagtacaattcttaatggaagcagttgttaaattgactaggagacaaaatggccgagaataaatatttaacggttactgatttaaattattatattacgcaaaaatttaagaatgatccttacctgcataaggtcttcttacaaggtgaattgtccaacttccgttatcggcgtaattcgcaccagtatttttcactaaaagatgaaaaatctaaaattaatgtggtgatgttccgttccttctttgataaggtgaaatttaaaccagaagaaggaatgaaggtttatgtggttgggtatgtcagcgtgtatggcccacagggctcgtatcagttttatgctgaacaaatggaaccggcaggattaggtgccttatatgagcaattgaagcagttgcaggccaaattagccaaagaaggtctgtttgatccagagcataagaagaagttgcctcattttcctgatcgaattgcagtagttactagtgcttctggggcagttattcacgatattatggttacagctaatcggcgtttcccgcatgctgagattgatttgtatcctgcgcaagtccagggtgatactgcagcggattcattagtgagagcaatgcgccagattgccgctcaaggcgacaagtatgatgtcatgatcatcggtcgtggtggtggctcactagaagatttgtggccattcaatgaagaagaggttgtgcggcaagtttacgcaatgcagatgccagtaatttcttcagttggtcatgaaacggatactaccttgtgtgatttggtggccgatgcgcgtgcagcaacaccaactgctgcagcagaatatgctacgcctaatacattggacgaaattgcgcatattaagcaattaaccagccagttggtagctagcatgcaaaatattattcgttcgaaacgtgagcgcttaagtcgggtgcagaattctgtcatcctgcgcgagccgactagactgtatgatcagcagattcaacaagttgatcaattaaaacaaaggctgcaaaatagtatgcaaaatcggttgacccattctgtccaaggttatcaactgttgaagcagcgtttgtttagcgttagtccagataagagaatcggccagatgcagcaacaagagcattttttacagcaacgactgattgataatatgcagcactatttgaaaaataaacgcaatagttttacccaagtaatgcagcagttggatgactatagccctttgaagacgctagagcgaggttttgtttattcaactgatgaacaagggaaaaccattagttctgtgaaacaagttcaaaaggatgatcatttgcgattgcattttaaagatggacaagttgaagcagtggttacaaaggtaaaggaagaacaaaatggcagtgaagaaaaataattttgaagaacaattaactaatttggaacaaatcgtgcaaaatttggaaaacggaaatgttccgttggaagatgccctaaaagaatttcaggagggcgtaaagattagccgtgatttagaaaagaagcttaacagtgctgaagaaactgtggctaagttgattgatagtgatggcacagaacacaaattagatccaaataacgcatcagcaccagaggaataaatatgacagcatttacttattttaaagatgaatggaccccagtaattgatgattatctggctaagcatttggctagtgaggttgaagatcaaaagatcagtcagattatggcctactcagtgatgggtggcggcaagcgcttgcgtccgttattgtttttagctacgttaaatgctttaggcagaaagattgaagaacctgaaattaggattgcctgcgggattgaactgattcacacttattccttgattcatgatgacctgcctgccatggataacgatgactatcggcgcggtaagctgactagccacaaaaaatggggcgaggctgaggcaattttagctggggatgcgctcttgccgatgggaattcaatggattgcggaaggcagtaagtcggcgaaattggtagatttaattaccaaagcagttggccctaatgggatggttggcggtcaatatttggatattgattcaactaacaatgctagtgttgcgggtgatgccaagtttatcaataagatggaatggctgaagaccggttgcttaattcaggctagcgttgagatggctgcagtttatgcaggagctagtgatattgaacaggtaaaattagtcgattttgccaaaatttttggtcgttcataccaaatctatgacgacttggttgatgtcgttgaaactagtgcagaagctggtaaagctacgcacaaggatgaagctgaaggaaagaataatactttaactttgttaggaattgatcaaagtcgcaaagaactaactgacttaattaagcaagcacaagatgatttgcatggactaaatggcgaagtgctaactggctttttagatctttatcaaaaggtgttataaatggcaaaacaaagagcagatattttattagcagaacaaggaatttttcattctcgttcagctgcccaaagagcgattatggcggggctggtttctgatcacaatcatcaacgaattgataagagcgggactaagtttcctgaaggggaaaagttttacgtgaaagatgatggtaagaaatatgtttcgcgtggcggctttaaactggaaaaagctcttaaggtctttgacattgatttaacaaataaaatttgtttagatattggtgcatcaactggcggttttactgatgttgctttacaaaacggtgctcagatggtctatgccttggatgttggctacaaccagttagcttggcaattgcgggacgacccgcgtgtagtggtgatggaaaagcagaatttccgctattcgaagccggaagattttgatcaaggactgccagattttgcaatgaccgatgtgtcctttatctcgttagatttgatcatggcaccgatgtatgcaattttgaagaatcaatgtgatgccgtttgtttgattaaaccacaatttgaagctggccctgagaatgtcggtaaacacggtattgttcatgatcatgaagtgcacaaggcggtaatcgagcacaccatgcaaaaggcattggagatcggcttcaatgttttaggcgttgattattcaccaattaaaggtggcaaaggcaatattgaattcttgattcatttacaaaaagacgaagcaaatggtggccgcaacttatggcaagggagcccagctgaagtggttgagcgcgccgtaagtggtctataggagtgaagctatgctagttgagctagatatcaaaaactttgcaattattaaaagcttaaaggttcgttttcaagaaaaaatgacggtaatcatcggtgaaactggtgctggtaagtcaattattattgatgctgtttcattactgatgggtggtcgcggtcaaaaagaaatgattcgttcgggtgagtccaaggcgattattactggcttgtttgaattggatgatcaaaaagaaaagatcgcggaattgtgtgatcaatatggtttgccgcacgatgacgatcagctggtgattagtcgtgaattagctgtcaagggcagaaatgtagtccggattaacgggcaattgacgacgattaatgttttgcgcgagattggtagctatttggttgatattcacggccagcatgatcagcaaattttgatggatcaggaccggcagattgacctagttgataattatgcccctgcttcttttaaggcagatttagccacttatcaaactgattatgctcaatggcaaaagctaaccagtcaattgctgcacctgcgtcaagatgcccaagaattagctcagaagcaagatattctgcagtttcagaataatgaattggaagcagccgaccttgaggatccacaagaagatgagaaacttgaggaagaatataacgaactaaataattatcaaaaaattgcggatacggcgaattacttcatgcaattgtatgatgacgatgagcatggaattgcaactttacttggagatgcgcaaaatgctgcgactgatttaactgaatttggttcaaaatttaaggattttgctaagacagttgatgatggagtttatgctttaaatgacgcccgcagtgaattatcgaacttaatggatgcaatggacttcgatgaggaacgttttcaatacgtgactaaccgcttggataccttgaattcattgaaaaagaagtatggcccaaccttggctgatgtgtttgctttttatcaaaaagtacaaaaagaactcagtcaatttgaaacaggcggccttgatgaggaaaaattgcaagcagaagttgccaagattgaagaaagaatgacccaagaagctagagatctgcatttaatacgcgaaaaagtggctcattctctggaagagcagattaagcaagagttagctgatctctacatggaaaaagctcgcttttctattaattttgatgaaacaaagacatttaccgataagggaactgatgcgattgttttcttaattgcacctaatccaggtgaagatttaatgccattagttaaaattgtttctggtggtgaacaatcaagattgatcttagctttgaaggcaatcttcagccgagttgaaccagtgggtaccatgatttttgacgaaattgatacgggagtttctggccgagtatcggctgctatcgggaaaaagatgcactcaatcggtcgcaacaagcaggtaattgcaattacgcactcaccacaagtggctgccgcgggtgatcaacgctacttggtagctaagcaagtaaaagatggttcaacctttactcaaataggcccacttagcaaggaagaaaccattacagcgattgcacagatgatggctggacaagatgtaaccgatgcagcaaagaagaatgctgcagatttgattaagagtattaaagatgactagtattagtaaattttggcgtgatttttgtgtagaacatcaagtaagtcctacagcattagaaggtgcttttgcttttggagctaatagccgggatgcagatattcttagtgatttggtcaaaagtggaattaagacggcaacgactagcctgtattctgcgcaagaagatgtaccggttgtagggatgtacgcaattgttttaaatggacgaaatgaaccagtttgtgtgattcaaaataagactgttgagattatgccatttaaaaatgtctcagctgagcatgcctatttagaaggcgagggcgatcgctcatatgaatcttggcgtaaagtacacgagaaattttttgcgcgcgaatgtcaagaactgggacgagagttcacagatgaaactgaagtagtgtgtgagacattcgagaaaataatttagtaaaggagcagacgattttgtctgtttttttgtatgcaaagagaaaacttgaaaaagaaacaattttagtgcaaactagatatattacaagttaagaggagttcagcatggcagataaaggtttattacttgtgctttctggtccttccggcgttggtaaaggaactgttaaaagcgcgattgttgaaaacaaagtctttccatttgaatattcagtttcaatgactacgcgtcaaccgcgaccaggtgaggttaatggccaagattatttttttgttagtgaagatcgctttcaagaggctattaaaaatggtgagttgttagaatataataaatatgtcggtcactattatggtacacctcttgcaccagtgaagaagatgcttcatgatggcaaagatgttttacttgagattgatgttaatggggcacaaaaagtacgtgaaaagatgcccgatggcgtgtttatctttttaaccccaccagatctacatacgttacatttgcgtttggaacaccgtggcaccgagtcagaagatgtaattcgtggtcgaattaagcaagcgcgcaatgaaattttggagatggaagactatgattatgcagtagttaatgatacagtagctaatgcagttgatcatattaaagcgatcgtcgatgcagaacatgtcagtgttaaacgtgtaattgatgactatcgtaagatggtcaaggaggattaattattatgagaattacttacccatcaattgataaattattgtcacgtgttgattcacgctattcattatctgttcttgccgctaagagagcacatgaacttgaagctggtgatccaccaactttggaacattttaagtgtgataaggctgttggtaaggcacttgaagaaattgctgctggtaaagttactgttgacccagctcatgccgaggttaacctcgaagattaatttattgaccttcatcctttggggtgaaggtcttttttacaggtgattaaatgattgctcaggttattgttgatgtagctgcacggcaaacagaccgtatttttgaatatcatattccaacagaattagaaaaggatattgcgattggatcaagagtagttgttccgtttggtcctcgtaaagtgcaaggttttgtggtggggatcactgatcaaagtgaatttaaaggtaaacttaaggatttgctagttgtggtagatgagatgccaccgcttacgccagagttggtaaagttatctgctgatttagcaaaaaatattttttcttaccgaattaaaattttacaagcgatgctaccttgggtaatgcgagcaaattatcgcaaattgctagtgccagctaatgatagagctgccaaaatgccgctgtttcagggtgatccaattgatttaaataaaattacggatctggcggagattaagcaattccgcaaattattgcaagatgatcaagcaaagattgagtatgtggtagaaaatcgagccaagaagaaaaaagaaaatcaatatgaactagcattaaaaaaagaggaatatcccaaaatttacaatactttacgtcaaaatgcggtaaagcaaaaaaagttattgatggatatcattgataatgcagcggattatcccaaaagccaaagccagctagaaaaacagcttggattgacggcggcgagtttgaattctgcgattaccaaaggttggttgaataaaaaaagtgttgaggtttatcgcgatccgttatccggatttgatgacggagaacataaaacagcggttaccttaaatggtgagcagcaaggtgctttgaaccagatcacccaagcaattgaacagcgccaggctgagacttttttgttggaagggattactggtagcgggaagactgaagtgtatttacacgctattagcaaggctcttaaacaggggcgaaatgcattaatgctggtgccagaaatttccttgacgccgcaaatggttcgtcaggttaaggcacgttttggtcaagaggtagccgttttacatagtgccctatctgagggagaaaaatatgatgagtggcgccgaattcgtcgtggcgagactaaggtggtcgttggcgctcggagtgcagtttttgctccactagataatattggtttaatcgtgatcgatgaggaacatgagtcttcatataagcaagaaaccgatccacgttataatgcacgtgatgtggctatttggcgtagtaaatttcataattgtccgttggttttaggaagtgcaacaccatcgttgagtagccgtgcacgcgcccaaaaaaatgtctatcatcttttacggttaactgaaagggctaatcaaaagaaattgcctaaagttaatttgattgatctaaagcacgtgcagtttgctggtggtcaatttgatttatctgttgagctagtagatgcaataaaaaagcgtttggcaaaaaaagagcaggttattttaatgctcaatcgacgtggttttgctaattttatgctttgccgtgaatgtggttttgtattaaaatgtcctaattgtgatgtttctttaaatttgcataaggatactaacagtatgcaatgtcactattgtggtcatactgagccagtacccacacgttgtcctaattgccaaagctcgcaaattcgttttttaggtgcaggtacacagaaggtacaagaagaattagaagagcttctgcctggtgcacgaatcttgcggatggacgttgatacaactagaagaaagggtagctataagaaaattctagatgcctttggtgctcatgaagctgatattttgttaggtacgcaaatgattgctaaaggattagatttccctaatgtaactttagttggagtaatcaatgccgatacaggattatggctttctgactataatgcttctgaaaagacttttgaattattaactcaagtagctggccgtgcaggtcgtgctgataaggaaggggaagtcttaattcaaacttataatccagagcattatgctattcaactagctcaaactcaggactacgaacgattttatggctatgagatgaatatgcggcatgctggtaactatccaccatatttttataccgtgctgatttccattgctgctaaaaaagaacagaatgcagctcgtgaggcttttaggattaagaggtatttgaatgagcacttgcatgtgccaacgattattttgggaccaacgccaagtgcaatttctcgtgtaaaaaataaatattattatcaaatactggtaaaatataaaaaagaaccaaatttaaatgaattattacaccatgttcaagattccgcgcaggaagctaagaaatatggtttaagtatttttattgataatgaaccagagagaattatgtaaggggatgctttaatgacatcaataatatttatgggaacaccgaaattttcagttccagtacttgaagggttaattgatgaaggctatgagattaaagccgtggtcactcaacctgataaaaaggtaggacgtaagcagaaaattactaagtcaccagccaagatcgcagcagaaaagcatgatttgccaatctttcaaccggttaagttgtctggatcagacgaaatgcagaaattaattgatatgcatgcagatttgattgtaactgcagcatatgggcaatttttaccaactaagtttttgaattcggttaaaattgcggcagttaatgttcacggctcacttttgcctaaataccgtggcggtgcaccaattcaatattcactaattaacggtgataaagaaactggaattaccattatggaaatggttaagaagatggatgctggtgatatttatgctcaagaagcaattaagattgagcctgatgataacgctggcactttatttagtaaattatcaattgttgggcgggacttattgcttaagactttaccagcaattattgatggctcaattaaaaaggttccacaggatccagaaaaggtcgtcttttcacctaacatcactaaagaacaagaaaagcttaatgttgatatgacagcagaagaggtcaacgatatgattcgtgctttgaatccagatcctggtgcttatttgatgattgaaggcaaacgtttcaagatctggaaggcagaaattgcatctgattcatcaagtttaaatgccggctctgttgttgctaacaaaggacgttttgccattagttttgctgataattcagtacttaacttacttgaagttcaaccaagtggcaaaaagagaatggacatcaagagctttttaaatggtcaaggtagtaagtttgtcccaggtgaagaaattgtcgatcgataagagtgcacgtgcagtcagcttagagacattgatcaaggtcttagatcaaggctcctattctaatattagtttgaataacagcttaaagcactctaacttgtcaattgcagaccaaaatttagctactaatattgtttatggcacgattcagtatcgattgtttttagaatatcagttaaaaggcttagttaggacaaaactgaccgaaaaatatattaagccattattgttaatgtcactttaccagttgatttttttggataaagtgcctgatcgtgctgtacttgatgaggctaataaacttgctaagcaatatggcaagcgacattcagctggctttcggttggtaaatgggattttgcgttcgtttactaggcgcggggtgattttaccagctgaaaataatccagttaaatatttaagtgtcaaagagagcgtacctgaatggttagttcaatatttaattgataactggggcctagacaaggcaaaatcagttttaaacagtattaatgagccagctaaaaacagtgtacgtatttcaaagttggcagataaagagcaagtttttgcccagttagagcgggataactatcaaccacaatggtctaagttatcaagcgatgatgtgattttgagtcacggtggcattagcgaaagtgatttgtttgaagaaggcaagttaacaattcaagatgaagctgccagtttagtcgtagaagcttttgactttgaacaagatgagcatgtgcttgatgcttgttctgctcccggtgggaaaaccgtgcaaattgccgaaagcattgttaatggtgatgtgactgccttagatattcatgataaaaaattacgtttagtacgagataatgcccagagaatgcacgttgcaaataaggtaaagactaaggcatgtgatgcacgtaaggctacagagatttttgcggcaggtgaatttacaaaaattttagtcgatgccccttgttctgggcttggattattgcgtcgtaagcctgaaattcgctatactaagagacaacaggacttacaaaatttacaaaaaattcaattggcaatcttaactgcagtaagttcactcttaaaaaagaatggcgagttggtttattcaacttgcttaatttcaatggaagaaaatgaagaggtagttaagaagtttttgcaagcacatcctgactttgaactagttccatttaagttaactaaacttgaatcaaagacagggatgttgaaaataatgcctgatctagatggcaatgatggatttttcattgctaaatttaagttacgaggttagatttttgattgaaacagcatacgcttcgagtattggtaaggtacggaaaagcaatcaagattttgtaaaagtttttaaaaatcaaaagggaattgtcttagcaattgtctgtgatggtatgggcggccatcaaggtggtgacgttgcttcaacaatggcagtcacccatttaggacataattttagtatgactgactttgcagatgctaatctcgctcataaatggcttgatgtgcaattaaattctgaaaatgaaacaattttaaagactgctgataagtttcctgacttaaatggaatggggacaacgattgtattggcgtttgcatttgataaaaatgccttaattgctcatttaggtgattctcgggcttatagttattctgaaggtaaatttgtccaattaactgaagatcattctttggttaacgaattagttaagatgggtcagattactaaagaacaagctaaacaccatccccagaaaaatattattacgcaagcattaggcgtctcaagtacgattgatcctgaatttgatgagatcaagatgggggaaaacgacattattttgctctgtactgatggcctaaccaattcacttagcgatccacaaatccaacaaattttggcaactaaggagcttagcttaagagaacgttgtaataaattgattagtgaggccaatcgattaggtggtggtgataatattactgtctgcttaatttggaacaaggaggacgagagcagtgatcgataaaggttatctgcttggggaacgttaccgcatcatcgataccttaggtgaaggcggaatggccaatgtctatctagcggaagatattatcctgcaacgtaaggtggcagttaaaattttacgccttgatttgcagaatgaaccgcaaacccaagctcgttttcaaagagaggcattagctacaagtgaattaagtcatcctaatattgtttctgtacttgatgtaggtaccgatcatggtttgccatacatggtaatggagtatgttgatggtcctaatctaaaagaatatattcaaaaaaattcacctttggatttaaatgaaattattcgaattatggatcagatattgagtgcagttgcattagctcataagcacaatgttattcatcgtgatctaaaaccacagaatattttgatggataagcgcggcaatattaaaatagctgatttcggaattgccgttgctttgaatcaaagctcgattacacaaactaattcagtaatgggttcagttcattatatgtctcctgagcaaacgcgtggcggaatggttactaaacaatctgacatctattccttgggaataattttatatgaattgatcacaggaactgttccgtttaacggtgatacaccagtggcaattgcactgaagcatgcgcaagaaccaattccttcaattcgcaagaaagattcaagtgtaccacaggcgctggaaaatgttgttttaaaggcaaccgcgaaagatccacgagatagatatgctacagctcaggaaatgaaagcagatttggatagtagcttggatcctgaacgggcagatgaaccggtttttgtaccatatcatggtaataacgatgataaaacaattgtattgcctggatttaagccacaaaaggaagaaaaagaagtggtggagccagcaaaaaccgaatcagtagaatcaagcaagctagtaaagaaaaagacttttttacagaatgtcaaaagtcacaaatggtggtggctgatctcaattattgccgcgggtttaatcatttttatgatgattttcgctttaagtggtactggaaataaacgacaggatgttaatattcctgatgtaactaatattgcagaaaaagcagctgagagtaaacttgaagcagcaggcttacaggttggaaaaattattaggcgacaatcagatgatataaaaaaaggccgggttattgcgacaaaaccaactgcaggcaatagtctagagcggggaaagagcgttgatttaattgtttccagcggttctagcatggttaaagttcctgatatggttgggaagaactatgccgaagcggcagaaaaattagaaaatatgggctttaatgtagttagagaggaccaatattctaataaagttgacgaaaatcaagttatttctcaaagcattgctgcaggtgtagaggttaagccgacgcagactacaattacgttgatagtttcacgtggcaagcaggctagatcacattcaaatatggttaccttgaaagacttaagtaattattctttgaagagtgctcaagactatgccaaagaacatggcctgactttacaaatcaatcaagaatattctgatgatgttgagaagggcttagtaatttcgatggagccaggtccgggtactaaggttgagcgtggttcaactgttaccatcaagatctcgaaaggtccaaaggaagacaaggaaactactgtaactaagacctttaccgttaactatgttggtgatgatctttctaagagtgagaagcctgataatgataaaggaagcaataactctgagtcagaatccgttaatggcaagggtgatcatgtccagatctatattaaggatgatgatcattccttgaacaatatttatcgtgacttgtatattaagcatgatatgagtttctcgattccatttaacattagagaaggtagtggacaattaaaggttgttcgcaatggcgatacagttttgaatgaaaaggtgactaaataaatgaaactagcgcaaggaaccgtcgttggtttgattgctggttattatgatgtagaaaccgctgcgggtatcgtgagaacgcgtgctcgcggcgtttttcgtcaaaaaaagcaaaaaccggcagttggcgatcatgtggaaattcagatagatgataaaggaatgagctatctggtgaaaatcttgccgcggattaatcgaattgggcgaccagcagttgctaatgtaagtcatgttttgttagtaatttctgcagtagaaccggatttttctgtagagctgttagatcgttttttgactttcttttcttggcaaaaagttggtgtaacaatttacttgtctaaagcagatttgctatcagaagcaaagttaaacacaatcaagcaagctttagcatattatcaaaaaataggttatcttgttttcactgattatcatgaaatgcaaattcagattcctaaaatgatcgaaaaaaatcaaatttggactttagcaggacagtcaggtgctggtaagtcaactttgcttaaccatttaaaaaaagatgctaatcaagcgactggtgcgatatcaactagcttgaatcgtgggaaacatactactagaaaggtcgaactttttaagttaggcgcgggctttttagcagatacgccaggtttttcgtcaattgatttgacaccaatcaagttgaatgagttatgtaattactttgttgagtttaaaaaggcaagtattcactgtaagttccgcggatgtcagcatttgcaggagccaggctgtgaagtaaagaagttacttgaagccagagaaattctggaaagtagatatgaggattatttggctatgcggactgagattagcgaaggtcgcataccggaatatttaaaatagaggtaatagctgatgatgattgcaccctcaattttgaacgcaaataatattgatcttaaaaatgatattgaaaatgcagtccaggccggaattagccgttttcatattgatattatggatggacattttgtgcctaatttatcttttggaccgcaactaatcaaagatttcaagcgtgaatttccgatgacagatgctgaaattcacttaatgagtgatgccccagataagttggtaccagcttttgttagtgcaggagcagatttggtcgaactacactatgaagcaatggacaagcctaagttatattattggttcgattatttagcttctaatggcgttgatgctgctttggcaattagtccagatacaccagttgaagtggttgaaccgtatttgccattactgaaacaagtattagtaatgacggtcaagccgggatttggtggacagagttttcttcctgaatcagttaatcgaattaagtcagttagagagattgtcggctctgattttgatattgaggtcgacggcggtattaatgatcagactattaaattagctgaaaatgctggcgctaatatatttgttgttggttcatacttgtatgaaaatggtgatgttggcagtcaagtacataaattagaaaagattattaagtaatgaaagcatatgcattgttgggcggtccaactgaattgtggcctgaagatattgaagaaaagctggctcaagctgatttagttattggggttgatcgtggtgccttgtttttagaagaactgggaataatacctgatgtggcagtaggtgactttgattctttacacgaaaatgacttaagccaaatagaaagtaatgttcaagacattcgttattctaatcctgtcaaggattggactgattctgagctaatgttgcagattgcttttgaagattatcatgtggatgaattagtgatttttggtgctacaggtggaagattggatcattttttgatcaatctattaatgttgctaaatcctgaaatgagattatatgcgaaaaaagtaacgttgattgaccaacaaaatctaatttgcttttttaatgcaggcacgcatgttgttcaaaaaagaaaaaattattcttatattggttttgcagctttaacagcaatcgaagattttaatattattggtgcaagatatgagttgaagcactattctgggaactatcctcgtgttttttcatcaaatgaatttttgcctaatagtaatgaattcaggattagcttgcaaaatggtatgattgcagcaatttattctaaagatattaatcgttttcatgatttataggttaaaatagaactatagaaaagaaacaagggaattcaaatgaaatatattgactttgaaaaagatattgctggtttcgaaaacggtcgctacgaagcaagacttgaccgtgcaaaataaaatgtagaagactacatgtacaagaaccacgttcacatttttgataaaaagaagaagaaggaagtagctactatcaatggcttagctagaaatgtaacttatcaagatttggacttgccaactaaggtgggtgaaatgattactgagtatgcatacacgccaattgatgaaagaatggccgacgaaattcctgatgacgataagcatcacaatattatgaagtaaagtaaaacggtaagaagacaaaataaaatggtcttcttaccgttttttatataaatcattaaaataagtaaaaaaataagcttgcaagatcagtgatctaacaagctcttggtctattaggcacgagtaactttaccagactttaaagccttggttgaaacccatacgcgctttggcttaccgtcaacaagaatgcgaactttttgaaggtttggcttccaagcacgacgagttgagttcaatgagtgtgaacgtttgttaccgaatgtagtcttcttacctgttacgtaatcttttgccatttgctaaacctcctttaattgtgatgtcatacttaattagattatcatatgttttcgcgcaattcaatactaaaaggattttttcaggtgtattttaattattgattatgtcgttactatgataaaataataaacgtatatatagataataagacggaggacgaaacatggctgttaagatcaagacaaaagatggtttgattgatatttcaaacggtgtaatcgcaactgttgttggtggcgcagctacgtctaactatggcgttgtaggtatggcatcaaagaatgccattcgcgatggatttgacgggattcttaatcgtgccaattataagcgcggtgttgttgtcaagtcagaagataacgaaattacggttgatgtgtacattattgttggttatggtttgaagatttctgaagtaagtaagaatgttcaagatagtgttaagttcaatttgaagaatcaattaggaatagacactaaggccgttaatgtcattgtacaaagcgttaaggtacttgacgaataacacaagcggaggttttaaatagtggttttaaatgagatagatagtaagcaatttagagatatggtacgtgttgccactcatcgaattggtaaaaatgcggagtttgttaactctttgaatgttttcccagttcctgatggtgatactggtactaatatgaacttaaccattgaaagtggtgctaaggctgtttcggaaaatccaagtactagtgttagtgatttaactgaaagcttggctaaaggtatgctaatgggtgcccgtggtaacagtggggttatcacttcacaattattccgtggcttttacaaggctacccaagggatgaagaccttaactgcacaggaattagcaaatgctttttcaaatggtgttgctactgcttataaggctgtaatgaagccagttgaaggtactattcttactgtagctcgtgttgctgcacaagccggtgctactaaggccaatgacaccgacgatgtaactgaagtaatgaaagctgtagttgaaggtgctaagaaggctcttaagtcaactccagatttattgcctgttttgaagcaagttggtgtagttgactcaggtggtcaaggccttttgtttatctatgaaggctttttggaaggcttaatgggtgaaaactttgcagatcaatatcaacctgacgaaaatgaaatggatgaaatgatcaatgcaatgcaccaccaatcttcagttcaaagccaattggctactcaagatattaaaaatggttactgtactgaaatcatggttgatcttgatgccgatgtgccaaataaaaagaagtttgatttggaagaatttagaaagcacttgtctggcttgggcgattcattattagctgtttctgatggtgaaattgctaaggttcacgttcatactgaacaccctggtgatgttttccaatacggtagtcagtttggtcaattaggcaagatcaagattgataacatgagaatccaacacgaaagcatcgttgaccaagatgaagaacaacaagaagcagttgattttgcagtgatcgcagttgcttcaggtaacggtattcgtaagttatttgaaagcgaaggggtaaaccgtattatctcgggtgggcaaacgatgaacccatcaactcaagactttattgatgcaatcaagaagtctggtgcgaagaaagctattgtcttgccaaacaacggtaatattgttatggctgctaagcaggctgctgaagttagtgatattccggttggtattgtaccaactaagactatttctcagggtttaaccgcgatgctttcattcaatccagatgcatctgttgatgaaaatgtggaagctatgacagaggacttagatacggttgtttcaggtgaagttactcaagctacccgtgatactgaaatcgatgaagtagaaattcataagaatgactacttgggaattgttgatggcaagattaaggttgacaatgctgatttaattaagactactgttgatatgattgaaaagatgctggatgaagattcagaaattatcacaattatgtttggccgtgatgctagtgaagagcaagcacaagaagtagttgaacaacttgaagccaaacatgatgatcttgaatttgaaattcatgatggtggtcaacctgtatatcacttcttagtatcagttgaataacaatgattgataatgcattatttgctcctgtcacagacttaaagggtgtagggacaaagactacagctgcattaggaagcttaggcatctatagtatttatgatttgcttttttactttccttttcgttatgacgaattacaaacattaccgttagatcaaatcatggatggtcaaaaagtaatgctaaagggaatagtagccactgaagcgtttgttagtcgttttggctataagaaaacgcgcttaagtttcaagatgagaattgaccatgatgtgatcatggtcaatttttttaatcagccgtggttaaaaaataaaattgagatcggacaagaagtagctatttatggtaaatacaatgttgcccggcaaagtttaacggcctttaaattcgtagcagccaaagaaaatgatagtggtatggcgccgatttatccggttaatcgacatgttaagcaaaaaaaattagtagatctaattaatgtggctattgacgattttattgatcaagtgcaggatattgttccggaaaagttgcggcaagaatatcgtcttttaaaagaccaagtaattattgaaaaaatgcaccaccctaagaatagtcatgaggctgaactagctaagagaagtgcaatttttcgtgagttttttatttttgaattacaattagctttattgacccgtaatgatggtaaacaaatgggttatgcaaagaaatacgatctgacagaaattgctcaattaactaaatctctgccatttgaattatcagatgatcaaaagcatgtggttaatgaaatctttgctgatatgcattctgatggtcaaatgcggcgacttttgcagggtgatgttggttctggaaaaactgttgtagccgtttatgcgatttttgcagccattacagctggctatcaggcggctttgatggtgccaacagaaattctggcaactcagcatttcaaaaaaatcgatgaattgttgcgtcctttaggtgtgcgagtagctcttttaacaggcaatacaaaaacactggagcggcgtgagatctaccgtgaattaactgatggcacgattaatgtggtaattggcactcatgctttaattcaagatagtgttatctttaaaaaattaggtctagtcattattgatgagcagcaccgttttggtgtaggacaacgacaagctttgattaataaaggcgatcaaccagatattttggcaatgaccgctacgccaatcccgcggacgctggctttgacagtttatggtgatatgacagtctctgaaatacatcatttaccagccggaagaaagccaattatttccacatggaaaacaagtagtcaaatgaaggaagtctatcgacaaatgcaagagcagctaaatcaaggctttcagatttacgctgtgacaccattgattaccgagtcagagacgttagacttaaaaaatgcagaagaattgcatgaaaaattaagccatgattttcctaatcacaaggtagtcctgcttcatggtcaaatgccaggtgcgcaaaaagatgagattatgactgcatttgcagctggtgagatcgatattttagtaactaccagtgtgattgaagttggagttgatgtggctaatgccaatatgatggtgatttataatgctgatcgttttggcttaagtcaattgcaccaactgcgtggtcgaattggtcgaggacaaacacaaagttattgtgtctttctagctgatcctaagaccgattcaggtaaagcaagaatgaaaattattgcgtcgaccaatgacggcttcaaattagctgaagaagatttaaagatgcgcggtgaaggtgatttgtttggtaaggctcagtcaggattgccagaatttcgtgtgggtgatgtagtaaataactacgatacattggtcgttgcgcaaaaagaagcacgagctttggttgcggctgatcctgatttatcagatccaggacataaggcacttaagcaagtgctagaatataagcaattagagcaaaacagaatttagaaaagattgtggtgaatatatgagaacaattgcaattgatgcgatgggtggcgaaaatgccccagatgcaatcgttaaggcggttttacaagctaaaactggaatgcctgagactaaatttttattatttggtgataaagaagcattaagaaaactaatccctgaagatcaaattaatgatcaattaggagttgtacctacaacagaagttattgctgatgaagatgaaccagttaaggcaatcagaaaaaagaaagactcttcaatggttgtggcagctaacttcgttaaggaaggaaaagctgatgcgttgctttccttaggcaatactggtgcattgcttgcttgtggaatttttattattggtcgaatcaaggggattgttcgtccaggtttgatgcctactttacctgttcaaaatagtgacgatggcttcaatatggttgatgttggtgctaatgctaagagtaagccagaatatcttttacaatgggccgaaatggcttcgtactatgctgagaagattcgcggcattaaaaatccgcgagtaatgctcttaaataatggagctgaaagcgacaagggtgatgatgttcaccaaaaggcctatgaattgcttaaagaaagtaatttgaatttcttaggtaatattgaaggtaatgaattgctattaggcaaggcagatgtggtagtaaccgatggctttaccggaaacgctgtacttaagaacattgaaggaacctctagcgtcttgcttcatttattaaaagatagtttattaaatggcggtgtaatgactaagttaggtgccttaatggtgaagggctcgttatcgagcttaaaatctaaatttgatacggctaaatatggcggtgcagttttactaggcgttaatgcaccggtagttaaaacccacggtagatcaaatgaacgtccaatttatttcactcttaagcaagtagataaaatggttaaagaaaaacttgttgcagattttagagacgaattcgctgaaaaatagtacaatgttttattaaaaaggagaagttttatgtcagaagaagaaatttttaataaaattaaagacatgatcgctgataattttgatgttgataaggataagatcactgaagacactaattttatgaacgatttggatgctgattcaattgatttggttgaatttatcttgcagctagaagatgaatttggcgcagaaattcctgatgatgaagctgaaaaaattaaaacaattggtgatgctgtttcatatattaagtctcatcaaggataattttctaaaaaaagccgtgtcgtgatttgcatacgaccggctttgtgtttataattagaaaataaatagaaaagattaaatgcttttaataaaaaagctcgagatggaggaatgacctttggagaagcagagtgatcttttattagatattcaacacctgcatacggcataccgtttgcaagggaaattctatgatgcggcagacgatgttaatctgactctgaagcgcgacgagattttagccatcgttggtgaatctggttgtggtaagagtacaattgcctcaagtatcattggattgtacgaccataaaaatactaaagtaacaggggacattctttacaatgaattaaacctagttggcttgaatgaatcacttttcaataagattcgtggggacaagatcggaatgatcttccaggacccgttagccagcttgaacccattgatgcgtgttggtgaccaagttgctgaaactctttattaccacactgatatggacgaaaaggcacgtcacgcacgtgtcattgaattgtttaatcaagtaggaatgccaaagcctgaagaaatgtacgaaatgtacccacatgagttgtctggtgggcttcgtcagcgtgttgtaattgcgatggcgattgcatgtaagcctgaagttattattgccgatgaaccaacaacagctttggatgttactattcaagctcaaattttggatttgcttgaagatattcaaaaacaatctcactcagggattattttgatcactcacgacttaggtgttgtagcagaaactgctgatgaagttgcagtcatgtatgctggtcaaattgttgaaaaatctgatgtaaagacaatttttgaaaacccacttcatccatatactcgatcattacttaactcaatgcctcaatcagacgatacggatgaagatcttcatgtaattcacggtactgtgccatctttgaagaatatgccacgtactggtgatagatttgctgcaagaattccttggattcctgctagcgcacatgaagaagaacctaaggtgcatgaagttgcgccaggtcactgggtaagatgtacttgctggaagtcattccactttaaaaatgaaaagacggcaagtggggagtagtttatggcaaaagaaattattcaaatcaaagatttaaaggtctattacccaattcgctccggtttttggaacagaattactgattatgttcgtgccgttgatggagttaatttttcaattaatgaaggagaaacttacggtttaattggtgaatcgggttctggtaaatctactactggtaaagcaattgttggggttgaaaaagttactggcggccaaatcatgtataaaggtttggacgtaaccaaagcaagtaaccgcaagaagcttgattacaacaaggatgttcagatgatcttccaggattcaatgtcaagtttgaacccaagaaagagaatcgaagacattattgctgagccaattagaaactttgaaaatttaactacagatcaagaacgtgatcgtgttcaagaattgttggatatcgtagggatgccaagtgatgcaatttataagtatccccacgaattctctggtggccaacgtcaaagaattggtgtcgcacgtgcggttgcaacgaatccaaagttaattgtagctgatgaaccaactagtgcgttggacttgtcagttcaagctcaggttttgaactttatgaagcacatccaacaacaatataatattgcttacttattcatttcccatgacttaggtgtggttaagcatatgtcagaaaacttagcgattatgcaccgtgggcgtttggttgaaataggtactcgtgatgaaatctataagcatccgatgcatatttacacgaaacgtttgctttctgcaattcctcaagttgatgttgaacatcgtgctgaacataagaagcatcgtgaacaagtcgaaaaagaatttgaagagaaccaaaataaatggtacgacaaaaacggtcgagtattcccactacaaaaagtttccgatactcactatgttgccttgccaaatactgaaatagaagaaattagggagggtaaagaataatgtggaaaactgtcttaagacgtcttttgattatgatcccacagttgatcgttttgagtatcattgtctttatcttggctaaaatgatgccaggtgacccatttagtggattaattaatcctaatacagatcctaaggaaattgctcgcttgagacaagctgctggtttgaatgatccgatttgggttcagtacttcagatgggttggcaacctatttcatggtgatttaggtactagttatattcagcatgtttcagttacttctttaattgctgatcgtgctgttaataccttctggctgtcattattgactgttgtgcttacttatgcattagctattccaatgggtattactgctggtcgtcgtgaaggacattggcaaagtactttaattcaaatctttaactacatcacctttgctattcctggattcgtattttatattttaggaatctggttattcggttataccttaggatggttcccaatttcaggatcagtttctggtaatgtatcaggattcttcccagttctttggagcagaattgatcacatgatcttgcctgccattttatgtgcgataatttcaactacaagtacagtacagtatttaagaatcggaattttggacaataaggttgaagactatgtcagaaccgctcgttcaaaaggtgttcctgaaaaagttgtgtttaataagcatattttgagaaactcattattaccaattgctgctttctttggtaatacaattactggacttcttagtgggtccgttattattgaaactgtctttagttaccctggtatgggtaagttgtttatggattcaatttctcaacgtgattacacaactttaacagctttgattttactttatgggattttaactttaattggtaatttgctttctgatattatcatgagtattgttgacccaagaattagaattcaatagggaggagaagaaaatggctaaagataagaaaatgaagaatgataaaagtcagcaggtttcaactcctccatcaggaatccgtattattttccgtgaaattttacgagataaggcagcactaaccgctttttgtattgtgattgcaattttattagtgtgttttgttggttctttattcttaaataaggcacaagttactgaaattaacattgcagaatcttactatgcttggggcgaaaatggtcaccttcttggaacagatgaaggtgggcgtgatattctccaattattaatcatgggtggacgtaactcaatcatgattggtatttcagtaactttgatttcaatggttgttggtttaattgttggtattttcgctggttattatgggggagtcatcgatgccattattatgagaattgttgactttattcagatcatgccaagtttcccaattttgattgtattagctacagttactccaaattacaatgcttacactttagtagggatgatttcactgtttggatggactgcgtcagcccggtattacagaagttttgtcttggctcaacgtgagcgcgagtatgtaatggcttcaaaaacatcaggttctagcgatttacaaatcatgtttagagaagttttacctaacatttcttcaatgattataattgacttagttttgggtattgctggtaatattggtgttgaaactggactttcatttattggttatggtttacctattactacaccttcattaggtactttaattgggtatgccactgatccagttaacgtaacgacccgtccatggctttggttgcccgctgcacttctactcttagtgatttcattgagtattaactatgtaggtcgtgctttgcaaaaggccggagatgcccgtcaacgtgaaaactaattgattaaataaatttatgtaagaatagtatgtgggtagctatcatgctattctttttgttatgattaaaaactttttaatatatttttctaatttaaacttcacattacgttaattatatgatattattttaacataaatttgattcaaaaaagtccacattaatttggaggtaattctaatgaaaaaaattaaaatgttaggctccatcggtttgattgctggtgccgctttatctttagtagcttgtgggaacaagaacaatgataatactgatgcttcgaaagaaaagttccctgaagcagtaccaactaaggctgcaaaagagggtggtactttaaagtacgccatcgaaactgatacgccatttaaaggtatttttgaaggtactttgtcaactgacagtattgatgacactgttagtcaatttggtaatgaaagcttagtcggtcaagataataatttcatgattaaagatggtgccgctaagtttaagttagataataaagctaagacgattacttttacccttaagaagggcgttaagtggtcagatggtaagccagtaactgccaaggacatggaatacccatacgaaatcattgctaatccaaagagtggttctcaaagatattcaactcaattagaaaatattgtgggctttaaagaattccacgaaggcaaagctaagaaaatttccggtttggaaatgcctaagggtgaaaatggcaatactttggttattcactttaaggaaatgtatccaggtatgaaccaaattggttcaggctacttctggaaacaagccactccataccactacttaaaggatgtaccaatgaacaagttaatgtcatctgataagatccgtaagaagcctttgttctttggaccatataagatcgataaaatcgttcgtggtcaatcagttacctggtcaccaaacaagtattactacaagggtaaaccacacattaagaagatcgttgaaagcgtaatttcttctaactcagcaggtcaagcaattaagtcacacaagtttgatattattgatgttgttaactcacaatggcgtcaagttaagggtactaaaggctttaactatgttgcgaacactccattatcttacagctaccttggctttaaggttggtaagtgggacaagaagaagggtatcaacgtaatggataagaacgccaagatgaacaataaggctttgcgtcaagccattgcttatggtatgaatgttaaccaagtaaacaagcgttacactcaaggtttgactttcagaattcctactttaatccctaaggcctttggtgaattctttgataaggatattaagggttatacttataacattaagaagggtaacgaactacttgataaggcaggctacaagaagaagggtacttaccgtgtacaacctaatggtaagccattgactattcacttggcagcaatgagtggtagttcaacccaggagccaatcgttcaaaactacatccaacaatggaagaagatgggcttgaatgttaagttaactaccggtcgtttgattgaatttaactcattctatgataaggttcaaaacgatgatccaagcgttgacatgtttatgggtgcttggagtttagctggtgaaccttcacaaaacaacttatacggtgaacacgcttcattcaactttacccgttttgtaacgccagagaacaacaaattgattgctgaaatgaatagtaagaaagctatgaacaacgagtatcgtaagaatgttctttggaagtggcaaaagtacatgaacgaggaagcttatgttgtgcctatttctaatagttactcaattacagcagttaacagcaagttaactggctattcagttgctactgacactaatactgatatgtggcaaagagtggcatttactaagtaattactcgaagcaaaagaaataaaaaacaacctgaaattaattcaggttgttttttgtctgcctatgaaaactggtataatttataaagtacaaaggggcaattttatggtaagtacaaaatttctaaaaaaattaaaagacgattataatatcgaatttaataatgaaaaattattagaagaagcatttacgcattcttcttattcaaatgaacatcctaatgatggaattcgcgattatgaaaaactcgaatttcttggtgatgctgtgctagaattagccgtttcgaattatgtttatcttcattatcctaagttgaatgaaggtgaattaactcgtttgagatctaatattgtccgaactgaaggattttcagaattcgccattgaatgtggttttcaagatgagattcacttgggcaatggtgaagaaaaagctggagcacgacaccgcaaaactttactggaagacgtgtttgaagctttcaatggggcacttttccttgatcaaggaatgccagcagtggaacattttcttcatttaacagtttatcctttgattgataagggtgaattcgatgattcgcgcgactataagactgacttgcaagaagtattgcaacaagatggtcccgtgaatatcgaatacaccgttattagtgaatctcaattaccttcacactttgttgttgaactaaaaattaacggaaaagttgaatcaaaaggtgagggtcacaataagaaagcagctgaacaacaagctgctaaggtcgctttacaaaaattagaaaaataaggggatgaaaaagtgccattaacagaattagtgctcgatggttttaaatcattcgctgataagacaactattcattttgatgatggaattaccggaatcgttggtcctaatggttcggggaaaagtaacattactgaagccgtacgttgggtaatgggtgaatccagtgctaagtcactacgtggaacgaatatgaaggatgtcatctttgccggtagtcaatttcgtaagccgctcaataaggcggaagttactttagtttttgataataaaaagcgtgagttggcttttgattcagatcaggtctcaattactagaagatttctgcgatcaggtgacagtgaatttttaattaataatcagcaagtgcggatgcgagatgtgcggacactctttcttgattctggaatttcacctaatagcctagcaattatttctcagggtcgagttgatcaaatcttgaattctcgtcctgaacaaagaagagtaatctttgaagaagctgctggtgttttgcattttaaacaacaaaaagaagctgccaaggcgcaaatggagaaaaccaaggataatttaattagaatcaatgacttggttaaagaacttgaaggtcgattggagccgctgcatgagcaaagttcgctggctaaagaatatcaatttcaaaagaagggactagatcagaaattaaaaagtctattagcttttgaaattgaggatttaaaccggcaaaaagaagaagtccaaaaagcagcagataggaaccaaatccttttaacaaaactggataatgaagtaaaaggttcgcaaagtgctgtttctgaaaaacgggcagaatatcaaaaaattcaaaatgagcgagagcaaacgcagagtgaattattaaagctaagtgaccaattatcacagatcaatactaacttgcaggtcgcacagcaatcacaacagtttaataattcaactagggtagaaactcaacgtcaagttgaagaattgaaaaatagcttggttaagctaaaggatgaattgtctgaactgcagcggaataaaaagcaacttaagcaggagcaagatgctttacaagagcagcatgatcaattgactggtgaattgcacgatgatccagaagaattgagtaagcgactagaagattgtcgtaacgactatattcaacttttacaagatcaggctacaactaataatcagattgttaatctgaatactgaattaaaacgtagtcaggcagacactacttatcaaaatagtgatgtaagcaagcagctaaccgatgctcggactgaactggaaaagctgagaactgaaggcaagcagctgacagttaagcggcaaaaggaaaaagaaaaatttgcgcaagttaatgatcaaaataatgatttaactaaacagattaatcagattcggcaagccgttaacgcagagcgcagtcaattagagaaagttgaagcacgacatgaagctttagtaaatattcaaaagcggcatgagggttattactacggtgtacgtaatgttttgaatcatctatctgatttccctggtgtgatcggagctgtgggtgaattgattacatttccagttgagctagaagctgcaatgacgacagctcttggcggtggcgtacaggatttgattactgaaagcagagttagtgctagggatgcaattaatcaattaaagcgtagtcgtagtggacgagctacttttttaccattagatggcttgcgtcaatacactattccacagtcaactatcactactttgcaatcttttagtggctttaagggcgtagcaagtgatttagttgaaagtaaagccgatcaagatattactgctgcgattaattatttgctgggtagtgtgattatcgttgatacgattgatagtgcaatgtcaatttcacgtcgagttaaccgctatcggattgttaccttagatggcgatgtgatttccccaggtggttcgatgactggtggtcaaagaaaccaacgtaataattcaccactgcagacggcaactgaaattaatcagttagagaagcaattacagactttacgacaaaatttggctgaagatcaagaacggttagatgagctagttactcaaggtgaaaaagttgcggctaaattgcaacaactgcgtgatactttgcaggagactaatcaagcgattaatgaagctgctatttctttccaaaatcaagaaaaggaagtaaagcggctaactgatgctaatagtttatataaatctcgagtaaaagaacaacaagatcggattgctgctttaaagaaagaaatcactcaggctaatgatcagcaggaacaattggctaagcaaaatgaagtacaaaagggcaaaatgaatgacttgcaagaaaagattaagaacttcaatagcttaagtcaacgtgtacaagaggaattatcaaagcttgatcctcaaattgcagtttatactaataagttggaaaacttagctagtcaggaaaaagaaaaaaatagtcagatcactaataatcagaagcaaactgatagcttagagcagaaattaattgaattaagtcaaaatggtgaattatcagttaagaagaattttgatttacaaacacaaaaagctgaaattaagcaaaagaatgaaactctgcaaaagaagctgaatgaacttagtgcgcaattaggacaagttgatgcgcagattaatcaacttgaccaagttgccagtcgtaattatgatttacgcaaagatgcagcaattgaacaagaagattactcagtaaagattgcgaagtttaattccgcaattgatcagcgcttgtcaactttgagtgaagagtatgccttaacgtttgaagctgctttagagcaagcagaaggcgaaaatactgaagaaaagcgcaatgaactggctaaaagcgtgaagttgcatcgcatgtcaattgaagatattggccaagtaaatcttgattctattcaagaatatgaagatgtgaaaaagcgctatgactttttgaatggtcagcaaaatgacctgttaaaagctcgtgatgaccttgaaaagtcaatgaacgagttagatgaagaagttaagacgcgcttcaagagtacctttaatcaagtagcatctagctttaagagtatttttccagttgtctttggtggcggtaaagctagattggaactcactgagcctaataatttgctagaaactggaattgagattatcgcacagccgcctggcaaaaagcagcaacgtttaagtctgctttctggtggtgaacgcgcgttaaccgcaattactttgttgtttgccatgttgcaggttaatccggtaccattttgtgtacttgatgaagtagaagctgccctggatgatgcaaacgttactcgttttgcgcaatttttgcttaaatacgatatgaaaacccaattcattgtgatcacgcatagacgagggacgatgcggcaggctgaccaactatatggtgtggttatgcaagaatctggcgtttcgcaagtattgtcggtatcattaaaagaaatgaagaataaaaatgaggtgaaatagttgggtttatttgatcgaataaaaaaatcactctttggtaaaaaagacgaagaggatgaaaacaaaaaagaagaaaaacagactgagcaagaaaatgaagctaagcctgaatcagaagataatgatcaagaatctgaaaaagtagttgatgaagctaaatcgaaaactgaaactactgatgaagaagaacaaacagtagaagcacaagaagactctgaggtagaaactgaatctggtgatgaagaaaaagcagtagatttagattctaaacaacagcctgaagaagttaaagtagaagagactactgagactgaaatagaagaacaagttgaagaaactgaagtttctgatgaggagccaacagaatcacaagaacagctttatgaaaaggggctagaaaagactaacaagggatttggtgcaagacttaacgccttttttgccaagtttagaacagttgatgaagatttcttcgatgatctagaagacttattaattgaatctgacgttggctatgaaactgctgaacaattaactgatgaattgcgtgaagaggctaaattgcaaaatgctaagtcacgtgatgacttgaagcgagtaatcgttgaaaagttggttgacctttatgataaaggcggcaatagcgaagatgagcaattgacgtataatgctgaagctaaacctaacgtttacctatttgttggtgttaatggtgcaggtaaaactactacaatcggtaagttagccaaacgttttaaggatgaaggaaagtcagtaattttagctgcggccgatacctttagagcgggtgccgttgaacagctagttgaatggggaaaccgtgttgacgtacccgtagttactggtaaagaaaaggctgatcctgcttctgttgtttatgatgcaactgaacgggcaatcagggaaaaagctgactatcttttagtcgatactgcgggacgcttacaaaataagaagaatttaatggctgaattggaaaaaattcaaagaacaatcaagaagcttttaccagatcagccaacagaaaccttgcttgtgttagatggttcaaccgggcaaaatgcgcttttgcaagccaaagactttgacaagaccaccgaattaactgggcttgttttaactaagttggacggctcatctaagggtggtgtagttctagctatccgtaacgaaatgaatttgccggttaaattggttggcttaggcgaaagagctgaagacttagctgattttgatgctgcaaattatgcgatcggtcttttccacggcttggtctagtgataaagttagagatgtaaatattgttttataaggagaattttatgaaagaatatagtgcttgtactactatcttagttggtaaaaatgcctcgattgatggcaccactatgattgctcgtaatgatgacacttttcgtccaattaccccacaaaagttcattattgagccagcccgtcatggtgaaaagaaacatattaagtcatggttaaacaagtttgaaatggacttgccagaagatgcgcaacgtgtaccagctgttcctaatgttgactacaagcatcgtggctactacgatgaaagtggaattaaccaagaaaacgttgcaatgtcatgtactgaatcaacttatggtaatgagagaactttagcatttgatccacttgttaaagatggattagatgaagactgcatgcagacttctgttttgccatacattcattcagctcgtgatggtgtacaatatttaggtaagttaattgctaagtacggttcaccagctggtaactcagttttattcagtgataaagatgaaatttggtacatggaaattgttacaggtcaccactgggtagccgagcgcattccagatgattgttacgctgcaactggtaatcgagttgcgattgaacaagttgactttgataatcctgattacttcatgtggagtaaaggtattcaagaatttgttgaagaacaccatttgaacccagatcatgaaggctggaacttccgtcatatttttggtacctatactgaacaagatcgtcactacaacaccaaccgtcaatggtatattcaaaaattgttcaatcccgaaattgaacaaaacccacaagatggcgatattccatttattcgtaaggcagctaagaagatcactaaggaagatattcaatttgctttaggttcacactaccaagataccccgtatgatccatttggtaagggtacggatgaagaaaaacatcgctaccgtccaatcggtttgaaccgtacgcaaaatgctcatattttgcaaattagaagtgatgttccagcagatcgtgcggctattatgtggttatgtatcggtggtccaactttcactccatttgtaccattctttgctaatatgaatgatactgatccttcatataacaatacctcaatggattacaatatgaatgatgcatggtggtattacaagtcatttgcagctatcgttgaaagtcattacccacaatttgttcagcttgatactacttatttaactgaacttaaccgctacttcagaggtcgagttgaagaaattatttctggtgcagaaggtaaatcaggtgatgaattaactgaatatttgactaaggaaaatcaaaagactgttgcccatactcgtaaggaaactgaaaagctttggggtcaaatgatgattgaatcgatcaacatgtccaaacttactttcaatatggatgaaaatctttaataaattcaaaacagctcgaaaaagggctgttttttataatatgtgaaatgaaaggaatatagacaatggcagaaggtactattggctcattttttactaagattaacaatgaagttgaaaaacaaatgaataacgatttaaaaaatttggtattaatgctaatgaattggaaatgcttattgaattaaatcatcatcagcatggcaaaacttttgaaaagttggctaaagaattgcatgtaactaatgacaaggtcaaatctttgacaaaaaaattggctgccaaagatttgtgcaagaaatttgaaaagcaccgtgcagaaactgaccaaactattacagggatgctcagtaaagatgaaactcttggcttggttaatgtactgaaaaagatgcttaagtcgagtgaagacaataagtaatgtaaaatagtagaactccagaagttaattacttttggagtttttttatgcaaaaattattgacaaatctttaatataatattactgtattaagtaaatagaacagtaatattattagtgaaaggataaaaatgtcagaaattttaagagtggatcaagtaactaagacttatggtaaaaaaggtgagaagcaataccaagctttaaaaggaattagctttgccattgaacaaggtgaattcgttggcattatgggtgcttctggttcaggaaagacaactttattgaatatcttgtcgacgttagataagccaactagtggacatgttttagtcaataagcaagacattactgcacttaagaacaatcaaatggcagattttcgcggaaaagaaattggctttatttttcaagatttcaacttgctagataatttgactaatcgcgagaatatagccttgccattatcgcttcaaggagtgaaggcaaaggatattgacggaaaagcaatggcgattgccaaaagattgggaatagaatctatcttggacaaatacccagctgaaatttctggtggtcaaaaacagcgtgttgcttcagctcgagcattggtccataatccggcaattttatatggtgatgaacctacaggagctttagattcacaatcagctacggaattattgaaaacaatggcagacttgaataagaatgatcaagtttcgattctgatggtaacgcatgatccttattcagcttcttacgctcaaagaattttgttcatcaaagatggaaaaatcggcaaagaaattaaaaaagaaaataagaccagagaagaattttatcaagatattattgctgaattaggtagacgttagagggaggtatagacgtgctttggaaattatcactaacagggctaaaaagtcgctttaaagattatgctgttttgttttcggggctaactctagctgctgcaatcttttatatgtttatgaccattgcaattaatccagcttttcttaagggttcaatggccattgccttttcaattacccagatggtctttatttttgggatagcgctattagctattattaccctagtctatattgtttacgcaaatagttttttgcttagtatgcgtaaaaaagattatggtacttatatgatcctaggagcgagaaatagtaaaattggccgtttaatttttacagagacggttgttattggtttactcgctactgcattaggaattttaattggtatcggcttgactcaagttgtttctcagttattaatctctcaactgggtttgcagctgcataaattcttaggcttttatttaccggctattttatggacagttgttttctttgtagttttatttttcttggctgcaatttggaatcggcacaaattggtaagtactagtgtaatcaagcttttgcatgaggatcaaaaaccagttaagttacgtaataaccgaatctggaaagcaactgaagtaattctaggccttgcccttctagccattggctactgggcaatgtgggattaccatcagttgcaaattaaatcggttgaaattggttttgtcactattttggctggttcatattttgtatttgattctgtatttactacagttatcaatgctttacggaaaaataaaaagtttaaatacagtaaactgcattcttttaccttaggtcagctaaaatttaggttaggtgattacaatagagttttaactgttatttccttgctttttgctctagcattaggtgcgatcactgttggattaaactttaataatatgacagagactgctcttcaggcaacatattatgatgctgtgttgtataaaagggatgctaaagttaatcaacaacttaaaaaagttgccgttagaaaacaaacgactttgaattataaggtcaatgggaaaaagaagtttcctgttctatatgttactgaccaagaaattgctaagaaaaaaatcaaattccaatctggtcgaaagaacggcgaccaaatgaattggaagacaaagacgattacagttgcaggtgtaaagaataaaaaacaagagatgaatttccaacttgctagtttaacaccttattctgattatgaggttaaagttgtaactccagctgaatatgtgaagattcctggaaaaaacaaacaagtaaccttgctattaatcaataactttagaagtaattttaataatattgaaaaattgcaaaagatgtcacttgaccagacagttactaaggatgcacaaggagtttatgtttctctgaataattctaaatctgctcaatatcgcttagtagcaagcgttgcgtcaggttttgaatttatgggcttcttcttaggcttagctttcttagctatgttagcttcaaccttaatgtttaaagtgctatcaggagcaaacagtgatcgtcctcgatatgaaatgttgtggaaggtcggatcaagacgtaagttattaaagagctcgattaaagcggagattggtaccttgttcgctttaccggctgtcttgggtgtgattgatgtattatttggactacaatttttcaaagggattttagctaatccatacgataaaatttggattccatttacgatctttttagtattgtatttgctttattacttaattacagtaaaactctatgaaggaattgtattgaaaaaataatggtacgaaaaaagatctgcaaaattgatacattccctgtcaagtagacagtagaattacataaagcttttattcctcagttgattaataatcagctgaggattttttggcttctcttattttcttttcgtgtattttttgccagtatttctcaattcgatgatttggtgcaatagggcaattcttaatattgcctttcatcgcttctttgcgcatttcaccagcagttaaaccgttaaaacgtttctgtggatcttcattaatgtagtaatctattgtcttacaaatagaatcattaagttcatcataactggccacttgaggatgaagaataactcgcatttctttgataatgccttgccagccttccattggaccattatcaatacagcagccaacacgagacattgattgcgtcatgccttggtcttctaattggttttggaaaggtgcgcgagtaaattgaaaaccacgatcactatggaaaagcggatgagcattagggtatgctttaacagcctgcttataggctgcttgaactaaagcagtatcgtttcgtttactaattgcgtagccaacaggatagcgatcatatagatcaaacacagtacatagatatgccttaggcaggttagcagcaacgacttcagtgatatctgtacaccatttttcattaggtctagatgcattaaagtctctttttaacttgttttcggccgttttctcaggcgttgtatgcttgaactttagcttctggtatctaggcttttgtgatctaatgccattgatacacatcaagcggtaaacagttttatgataaaccggcttttcatcagacatctgtcgattaactgccatggtcatcttttccgtcccaaacagactgttgttagacttggttatttcaatgatctttgcttcaatctttttgtctcgttcttcacgcttactcggcttgcgcttaggatcaaagtatttgtaataagctgagcgtgctattttagcccatttgcacattaaatcaatcttccaattgtacttttgatggcagtcatggattaactgatatgtttcttgtttccagcgtctttttattgcggcttgtctgtatcttggttgtccggcaagcacatcctttctaactgatctaatttttttaggaattcgttcttagtttgttcttctttgagctgacgctctaattccttaatttttcgattagccagttctaactcagttagctcttctggcttcttatgtctgcctcgtttatctgttaatcctgtttcaccattagctagatatttgtgtgtccagctgtaaacctgctggtaagaacaatcaaatttgacagctgtttgagtgtaattcttgtcgtgattaagacagtattgaacaatctgaattctttcttgctgggtagtttttcttcttgctttagtcatatagacctccggatggggatcatagtcccgattttctatatgactattatacttggaaacccattctgatactgttccattgcttctaatgccatatttattagctaaagaaggtaacgacattttgccagctaaatattcttgaacaaccttttctttaaatgccttagagtaatgattattgtattgagcattacttagaagggtatcacgattgctttgatattgatgaacccatcttcttacttgcatcgctccacttttacttggcatcttaagccgtttagctatttcaacgctgctcctattaccattcaagtattgttcaactgcccatatcttttgatcgaatgaatatttactttttctggacataaaaaatcccacctccatggataattgaatactttatgtatttcaatcgtccactttagtgggattgtatcaaatgcagatctttttaactgtatttagattaattttatttattttgcttatttaaaattgaatgacgaacaccatagctaaagtaaatgattaagcctaaaataaaccaaataccagcataaaatttagcttggtagtcaagccctaagaagacaattaaagcagccatgaaacctaaagcaggtaaaactggataaaatggcatcttgaatgaaggatcatcaatgtcttttccttcacgtggacgcaacttataaatacctaaagaaacaaacataaaagcaattaaagtaccagctgaaaccaattgtgacaacatggagaaggggaaaaatgctccaagtaaaattgctacgattgttaatgtccataaagcattattaggtcgacgatctgcattcaacttgcccagccatttaggaagcatcccgtcacggccaaatgaatagatcaatcttgaaccggccatactcatcccaatcaaagcagtgaacatccctaaaacagcaatggtttggacaatgatggcaacaattggatgaccagcaaaccgtaaggctaaacccactggttcagcggaattagcatacttctgataaggcataattccaattaaaactaaactaactccgacaaataaagtaacagcaatagcaagtgagcctaaaatgctgcgaggcatagttttttgtggattaattgcctcagctgagttagcggcgattgaatcaaagccaatgtaagataagaaaatcattgaaacaccagcatagattccttgccagccaccgaatggaccgttagcagtcatcttgtatttcggtataaatggggtgaagttaacttttttaattgcaaaaacgccaacggcaataaagagtagaatggctaacacctttaatacaactaaggcattttcaacgcgagctgcccttgaaacaccatgaccaattaataaggcaactaacaagattgaaactaaagaaatgatatcaataataccaccgttattgccaaaggcgttagataatgacgcgggtagtttccaacctaatggtgcgattagagctctaaagttagcagaaagccccgaaccgacgaaagccaaagcaatgaaatattctgctagaagggcccatcctgctacccaaccccagaattctcctaaaactacgttgatccatgaataagctgatcctgcaaatggcattgcagcagccatttctgcataggcaaaagccactaaaccagcagcgattgctgctaaaataaaggaaatcgctactgcagggccggtatgcttagctgcaacttcaccaggtagagtgaaaattgaagcggagacgattgttccaacacctagagctaagaagtcctttacttttaatgagcgcaccaggtgtccatctttattttcatagacgcgtggatcttctttactgttcattctctgccaaagattcacaacgcaacttcctccttatgttaaaatatattcatctaattataattaaaagtacgttaaaaaatcaactattacatatttgaaattccactttttttagaaattgttatctaagataggttaatctagcactagcttatgacctttgttatactaaagactggtgaaaatcaatggatgaactaactaaaaacgaggagctaggcgatttatatgcctactatggctctttattaacccaggggcaacaatcttattttgaagactattactacaatgatttgtctctaggcgaaatagctgctaatcatcaagtatctcgtcaggctgtctatgataatctcaagcgctcaagtaaaattcttcagaactatgaagagaaattgcatatgaagcgcgacaacaatcaggttgaagatgtcttggcagatacgcttttatctttagataatggtgatagtgaagctgctaaaaaagaaataaccaatttattaaatcaattgaggggagaatagcccatggcttttgaaaatttaagtgaaagaattcaaaaagcattaaaaaatttaactggcaaaggtaaggtctcagaagaagatattaataaggctagtcgtgaaattcgacttgctttgttagaagccgacgttaactttaaggtcgttaaggactttattaaaaccattaagaaagaagcccttggcaaggaagttcaggaaagtttaaacccaggtcaacaagtaattaagatcgttaatgaacagttaacgaagatgatgggtgaagaagcagttcctttaaacaagtctaagcatattccaactatcattatgatggttggtttgcagggaactggtaagactacgactgtgggtaaattagcctatcatttgcaaaagaccgaaaaggcccgtccgctgttgatagctggcgatatttatcgtccggctgctgttgatcaattgaaacaaattggtgatcagttaaaagttccagtatatagtgaagacggagaaaaagacgtagctaaaattgttcaagatggacttgcagaggctgaaaagaacaagaatgactatgttttgatcgatacagctggtcgtttagaaatcgatgaacctttaatggaagaattagagcgggtaaagaaagtaacccatcctgataacattcttttagtcgttgatgccatgactggtcaggcggcaacagatgtagccaaaggctttgacgaacgccttgatgttacgggcgtgattttgactaagttagatggtgatactcgtggtggtgcagctctttcaattcgtgcggtaactggtaagccgatcttatttactggtcaaggtgaaaaattaagcgatttagatgttttccatccagatagaatggcatccagaattttaggtatgggtgacatgctttccttaattgaaaaagcccaacaagattatgatgctaaggaagctgaaaaagtcgctgaaaagatgcgggaaaatacttttgacttcaatgattttgttgatcaattgcaacaagttcaaaaaatggggcctcttgaccaaatcatgaagatgattccgggactagctaataatccgcaattaaagaatctaaatgttgatcaaaagcaaattgatcatactgaagcaattgtttattcaatgactcctgaggaacgagaaaatcctgatatgcttaatccaagccgtcgccgaagaatagctgctggttcaggtcgtcctgtagttgaagtcaataggatgattaagcagtttaagcaaatgcgcgacatgatgagtaaaatgtctaaaggaaatatgaagggcttgagcaatttgcctggaatggattcgccaatggctaagatggcaatgcgccgaatgaacaagaatttcaagaaaaataagaagaagcgtttacgcaaggtaaaaagattccattcttaaaaaataaactgttaaggaaaaatactttacacctgttaagtttggtggtatattattaatcgttaagttttaggaggaaattaatttatgtcagttaaaattcgtatgcaccgtgctggtgccaagagaaagccattttacagaatcgttgttgcagactcacgtatgccacgtgatggtcgcttcatcgaacaagttggttactacaacccagtttcacaaccaaaggaattgaagcttgacgaagacaagatctttgaatggttacaaaaaggtgcacaaccttcagacactgttagatcacttctttcaggtgctggcttgatggctaagttgcacgatgcaaaatacaataagtaattttgctattaattaagagcttgatgccgtgtgcttcaagctttttttatacctaaaggagaaaaaatggaatattacgatgttgctcggattttaactacgcacggtttgaatggtgaagttaaagttagtataattactgatttccctgaagatcgttttgctatagggatgcatttggcaatcaaaggtgaaacttctcaagttttaactgtggccaagagtagaccttttaagcaattttggttagttcaatttgcagagattactgatattgatcaagctgaaaaattaaaaggaaaaatactagttgttagtgaagccgaccgcggtgaactacctgaaggcgtttattattataaggacatctttgactgtgatgtcattgatgaagaatccggtaagcgcttgggtaaaatcactgatattgaatcgcctggtgctaatgatatttggctagtccatgaagataatggtaaagagtattggattcctaatattgcatcggtggttaaaaaagtagatgtagctaataaaaaagtctatgttgagttattggagggcttacgcgatgaagattaatgtattgacactttttcctgatatgtttgctcctttgcaagtttcaatgttgggacgtgggcttgaagataaaaaatgggagcttaatttagttaattttcgtaatttcactaccgatgtacatcatcatgttgatgatacgccctatggtggtggcgctgggatggttttgcaaattatgccgattaaaaaagcacttgactcgttaccatccacaggtaaggtaattattactgcaccacaaggtaaaacttttaatgaaaaaatagcgcaaagctgggccaaagaagatgaattaacctttatttgcggacattacgagggctttgatcagcgggtttatgacttggctgacgaaactgtttcaatcggtgattatgttttaactggtggtgaattgccaacaatgagtatgattgatgctacagtaagacttttacctggtattttgggcaatgcagctagtccagttgaagaaagcttttcacatgggttgttagaatatccgcaatatacgcgtccagcagattttgaagggcaaaaggtgccagagatattgactagtggcaatcatcaaaaaattgcacaatggcggcataaagaggctcttagaacaacatatttgcatcgacctgatttgctcaaagaacgagttttaacaactgaagaaaagaaaatgttggcagatattaaagcagagcttgattaagcaagctctacttgatatactattcatcgtggcgtgaccacaatgaataagtttaggggtgttccgctggcgttggtacgttgatgaatgccgaagaaggagaaaagtatattatggatccattaattcaagaattaactaaagaacaacttcgtgacgatattcctgcattccgtgcaggtgacactgttactgttcatgtacgtgttgttgaaggtactcacgaacgtattcagttgttcgaaggcgttgtaatcaagaagaagggtactggcatcggtgctacttacacagttcgtaagattgcttcaggtgttggtgttgaaagaaccttcccagttaacgacccacgtgttgctaaggttgaagttaagcgtcatggtcgtgtacgtcgtgctaagctttactacttacgtgaacgtcacggcaagtcagcaagaattgctgaagcacgtcgttaatcataacgtcaatcataaaaaaggtcagttccagtggaactggctttttttctacccaaaagttgtatataaaatgctatgatggagttatggaatgaatgaggtgaaataaatgaagttcaattgcaaatttgcacttgtggcagcaaccgtattgacagtagcacctatattatcttttcccaatatcacgactacggtacaagcaacgacgaagaaagcccaagcagctaagaatacaatccaggtaaataaagcaccaataatttatgatcgtgcaggtaattataattcgaaatatcatcaaaatatcaaagctggtactcatttaaaatatagtggcaagacttatattattcagcagcgctttgcagctgggattcctgtgccaactagtcgaattattggtggtaagctttactattcgattggtaaaggaggctatgttaaagaaagcgatgtgttaacctggcttggtaacacaaatacggtcaagttacattttcggcacaagaaaaattatatttatgataaaaatggtaaaaaattagttagctataatggtggcaagaattattttactaataaacaaaaaccaaaaattgaggtaccatactataattcgcctaagcaattatttaatattggtaagggcggttatattgatgccagccaagtaactactttgaatggcaagggaaccgtgtttttaaataataatgcacctatttatgatgcaacaggcaagcaattcaagaataaaaatctaaagcaaggcacggttttaaactattatggtaaacctaagaaagcggctgctaatactcaattttattattatcaaaataaaactaagatgactttacctgcaattcaacaaggtgatcatacttattttcagattagtaaaacacaatatatcaatgcggcagacgttgctttagtagatggtaagacgttgtgggataaaggacctgtgagtgtttctttaataaatgatgcatatgcgtatactgccaaatttaagcaaaataaaaaggtgctttatcgtgctggcgctaaactaacggttgatagaaccaaaatagaaggtgaaaaatcacctcaactttatttacatgttaaaggtaccaaaaactatctttatttgggtaatgaaaaagactatggcgcatcaccattagattatcgtcacggttcaactaatttaatattgcagacactgttgcataattagtctgtgtgtaatacttttaaactgatatcataaaggactattatcttaatagaaggtgatagccttttattttaaaaagatcacaatgataaaatggctgtatagtagtaatgatgaaaaaagattgtgaagaaattcaaccgtgaaacggttgtgaaactaagacaaaaatcacaaagctggcagatatctattactaatcttgatataaaggcatttgttattgtgaagctatttttgtaaaaaataatattaaatgtggaattagcgttagaaacaatagttatccacatttgtaaatgtccccagtaaagtcgagtaaaacaaaaatttaaaagaagatggaaaaatggattatccgaaaaaactgattgacgaagtgaaagaacgatctaaaggcatgcagctagaaggaattaattctggctcgggtccccaacatcctttattaatgattgtcggtgaagctcctggtcgaaatgaaattgttaataatattccctttagcggggatgcgggtaaggaattggataaatcattgaagcagattggtctgacacgtgatcaggtatatattacatctgctgtgagaagtcgaccttttgcaatcaaaaaggtttttagcaagcgtgaaaataaagaagtaatcaaatatcccaatcgtaagccaaccaaaaaagagattctagctcatgcgcatttcttagattttgaaattgactatgctcaaccaaaactaattgttgccttgggtaatacgggattagaacgtcttttggggtctggtcataagatttcagctgaacatggtcaagtaattaaaaatacaccaattttacgtttaaatgaaactaaagacggctatatttggtcaaaagaaagatacactattttcccagaatatcatcctgccgctgttttttataatcgcaagctaacagatgatattattaaagattgggataaaatcaagccgtatgtagaaaaggaaaaatctgaaaatgagtaatgaaacttttttgattccaattagacaaaataatgatttatcggatatcgctttaaatgaattacgcatggatctagatgagcatgctttacatcaacgttattacactgatattgcttatttagcaggaaatagtcgtaagtatagtctaaatagtgtacaaaccgttgcgagtcctttgataggtaagaaaattttatttttgggttcttctgttacttttggttttggcgctttgggtgaaagctttgttgattatctttggaagcgtgatggcgttgctgcaattaaagatgcagaaaatggtacgaccttagttgatgaagatacttataagccaaacgattcttatgttgctcgttttagagaagagctgaccgaatcacaacctgatgtttttgtcttacaactttcaactaatgatgcaaatcaaaataaaaaactaggcaaaattactaatcaaaactttgacaccaaaaccattacgggagctttggaatatatgatttcaacggctcaagcaaggtggaaatgtccaattttaatttatactaatccttattttgctaatccgttatacaaacagatggttgaacgagtacacgaactggctcaaaagtgtcacgttgagattctagatttatacgatcatcctgattttcagcatcaagacgctttgtatatggctgatgaaattcatccaactcgtgcgggttatctaaagaaatggttaccattatttgaagaaaaaataactgaaattttggcataaagaaagacctagataaattatctaggtcaaaattgaaattagtcaatgttattacgatacaagctaactaccttacccaaaattgtaactttaggtaaaatgattggagccattgtatcattttctggctgtaatcggtagtgatccttttctttgtagaaacgcttaactgtagcttcattttcttcagtcattgccaccacgatttcaccattgttggcagatgattgtttgcgtacgattacgctatcaccgtttaaaatgccagcgttaatcatactttcaccgtggactttgagcataaagagttcaccagcatcactttttaagtctggtgggagtggaaagtagtcatcaatatcttcaactgccagaattggttgtcctgcagtaaccacaccgataactggaatttcctttggcttgatacctaactcttttttaccttcacgggtaatttccaaagcacgaggttttgtagcgtcttttactagccagccctttctttcaaggcgagctaaatgaccatggacagtggaagtagaagaaagaccaactgcagaacagatttctctaactgtaggtggaatgctccgtttctcaactgtatcgtaaatatattgcaaaatttctagttgctttttatcgcttgtttttcttggcatttttaattctccgtttgtatttatggtacttaatattataacctaattctaccagataatgtcaatattatcaaacaggcgttcttaagaagttatactttttttatgacataaaatagggtagactaatgagtgttaatgtgaggtggaattattatggataataaagatgcaatgagcaaagaagaagaaaaaaaggtaactgatcgaatcaacgaactttaccataagaaagaaaaggaaggcttaactccagaggaagaagctgaaagaaaagaactacataagaaatttttagctaactttagagctgcctttaagcaagatgttgaaaacatggtcatcttagacaagaatggcaaggaagttacctcagaacgtgccaagcgagcacaaagaagaaaaggacttagaaaagattaattagttctttcaaaaagttagagaactatgataagatataaatgttagttagatggaggatttaatatgaatttaggtttagcaatttttttaattatcattgcgctcttgattggcgctgtagcaggtttttacggtgcaagagcttacatgaagaagtactttaaggaaaatcctcctattagtgaagatatgatcgttgctatgatgtcccaaatgggtcaaaagccttcaaataagaaggtacatcaagtaatgaacatgatgaagcaccaacaaaagtaattaatttaattagttttgttagaaaaggcgaaggatttccttcgtcttttttgtgcacttttaagaatgaggtgaaatatgggaatatttagtaagttagggtggttttttaaggctgagaaaaaacgttatatcataggcattacctttttggcgttaacttctttagctaacttggtaccgccccgtgtattaggcttaatggccgatcaattggatcaaggtcacatctcttggggacaatatggaatgttgatcattgctgtcgtggccgctgcattcacactttatattttgcgctatttttggcgtaaacaaatttggggcggcgcagcagaattagagcgccaaatgcgttcaaagttatttgatcattttatggtgatggatcggactttttatcagcgtcatcgaaccggagatttaatggctcatgctactaatgacgtttctgccattcagaacgttgctggtgatggcgttttaacattggttgattctttagttatgggactttcaacaatgattgccatgatcatttttgttgattggcgtttaactattgtagctttattaccattaccgtttttggcattgggagcttggaaattaggtgatcacttacatgatgcttttgataagtcacaggctgcattctctaagctgaataataaaactcaggaatctgtatctgggattaaggtgctcaaaacttttggtcaagggaaagaagatactgctgcttttgacaagatggtcgatgaaacgatcaatattaataaaaaagtttttgtctgggattccttatttgatccactgggaacaataattatcggtactacgtatgtgatcacgattatttatgggggactattagtaactaacaagattttatcaattggccagttggtttcttttatcgcgtatatttctaacatggtttggccaatgtttgctattggttatttgtttaatattctagagcgtggtagtgcaagttatgaccgtgtagaaaagttacttgatgaaaggcctttgattactgatgcacatgcagatccaaatattacttctcaagatttgcaaggtgaattaaaatatgacattaaatcatttgcatatccagatgagccagatattccagttttaaagcaagtcaatttcactttaaaacctgggcaaactttagggttagttggtcgagttggtgcgggtaaaaccacaattattcaactgcttttgcgagaatttgatcagtatgatggtcaaattactctgaatggaaaagatattagaaatattcaactaaaggtattactcagtcagatctcctacgttcctcaaaataatttcttgttttcaactagtatcggcaaaaatattgctttctcttctgaaaatgtagataaggatgatattgcagctgcagccaagaagagtgatttgcatgatgatgttttgcaaatgcctaaaggctatgaaactttagttggcgaaaatggcttatctctttctggtggtcaaagacagagaatgtcaattgctcgggcattgctaaaagatagtcagattttgattttagatgatgcattgtcagcagttgacgcaaagaccgaaactgagattttgtcatcattaagaaaagagagagctgataaaactacaatgatcgcggctcaccgtttgacttccgtgatggatgctgatttgattttggttctaaaggatggtcaaatcgttgaacgtggtaatcatcaacaactattagctgcagatggatggtatgcggaaatgtggcgtagacaggaattacaagcgaaagtaggtgaagatacagatgaataataacgaagaacagcatgaatctgtttggtctaaggcgataccatttaaagagcaagttgatatttttaagcgtttaatgggctttgttaagcaatttaaatttgaaatgattgttgctttagttggtgcatttattgttagtgtaattaatattcttttgccacgtggcttgcaatatttcttagatcactttctattgcatcaaagcacaacagtgcaggtgattttgtttgcaggttttctttatgctttaggctcaattttaaaggcaataattcagtttacttaccaatatttctttgctttaggatcagaaaaaacgctagagagtgtcagaagggcattgtaccgcaaactgcataagctagggatgcgctattttgatcaaactcctgcgggctcaattgtttctagagttactaatgatacgatgactttgagtaattttttgacggtgctatcaacttttgtgattggtgctttttcggtgattactgcgttagtagcgatgtttactactaatatagttgctgggtggttgattttactctttattccgattttattattagttgtttggctttattcgcaaaaaagctcacgtctttatcgtaattatcgtgagcgtcttagtcgaattaacgctaacttaaatgaatcaattgaaggagtatcggttatccaagaatttaatcaagaaaaacggatgactaataattttgaaggcgaaaatggtggtttaatgaatacacgcttcaacatgatccgagtaaattcattgttattatcgccattgacatcgctgctttattcgttagctttagccatttcattaatgtactttggttttccattacgtgaaacttttgttccagctggtgtagtctatgccttttcacaatacatttcgcaactttttaatcctatttcaactgtgatggatcaaatgacctttttccaagatgggattgttgcaggaaagcggatttttcggattcttgatgatacccaatatgaaccacagcaggatgctcaaaaaggattgacgattactaaaggaaaaattgagtttaaacatgtaagcttttcttatgatggcaagcatgaaattttacatgatatttctttcgtagttaatccaggtgaaactttaggaattgttggtcatactgggtcagggaagagctcgattattaacgtgatgatgcgtttttacgaattcggtcaaggtgaaatcttgattgatgacgttaatattcgtaaatatcctaaagaagaattaagaaaaaaacttggcttggtattgcaagaaccgtttatgttttatggagatatttcatctaacattcgtttgtataataatcaaattactgataatcagattaaagacgccgctaaggcagtccaagcggatcgctttattgaaagaatgccgggtaagtatcatgctaaagtgattgaaggcggagaagaatttagtcagggacaaagacagttaatttctttcgctcgaactttagtcacagatcctaagattttggttttagatgaggcaacagcaaatgttgataccgagactgaaactttgattcagcaaggactaaagcggctgagaaagggtcgaacgacattagctattgctcaccgtctttctacgattgccgatgcggatcaaattattgttttagacaagggacgcataattgaacggggtacgcatgatcaattgcttgcacaaaagggttattactataatttgtataccttgcaaaataatgaaaataaaaactaattgtttttcaggacgtttgtgtagtagcaacgtctttttttgatataatagttaaaaagtattaaataattatgaatatttataaggagcaaaaatgaaaagatattttacagttcgtggtggagctggcgacgtttctaagccagacttaaatgctaagccacaagataacttatacttggctgttaactcagaatggctatctaaagcagaaattcctgctgataagacatctgctggtgtcaattcagagcttgaccaaaaaatcgaagatcgagtaatgaaagactttgcggacattgcggcgggcaaagaaaagatgcctgagattaaagactttgataaggcagttattttgtataagattgcaaaagattttgctaagagggatgcagaaaaagctaatcctattcaaaaggatttacaaaaattaatatccttaaataattttaatgattttaaacaaaaagctgccgatttgtttatgggaccatatgctttaccgtttgtatttgacgtcgatgccgatatgaagaacactgatgtaaacgtactccattttggtggcccaagcacattcttaccagatactacgacgtatcaaactgctgatgctaagcaacttttggatactcttcaagaccaaagtattaacttactgacaatgtccggtattggtaaaagcgaagcacgagtttatgttgaaagcgctttggcctttgatcaaaaattagctaaggtagttaagtcaactgaggaatggtcagattatgccgcaatttataatccagtaacatatgctgactttattaaaaaatttaaatcatttgacatggctgatttcatggattctattttaccggttaagccagatcgaattatcgttatggaaccacgttttctcaatcatgctgaagaattattgaatgaagggaattttgctgagattaaaggatggatgctagttaaatacattaacagcgtagctaaattattgtcacaagattttcgtgaagctgcgtttccttttggtcaagcagttactggtacgccacaattgccatcacaaattaagcaagcttatcgtttggctaatggtgcttttgatgaagtagttggtatcttttatggacaaaaatattttggggcaaaagccaaaaaagatgttgaagacatgatccaacggatgcttaaggtatatgaagaaagaattaatgctaataaatggctttctgctgaaaccaaaaagaaagctgtgattaagttaaaggcgttggttttaaaaattggttacccagacaagatcgaagaaatctttgacttattacaagttgatccgaaaaagagcttgtatgaaaatgaagcggcaatgtcaactgtacgaacgaaatatatgcttaataagttaactaagccagttgaccgttcagtttggctaatgccaggtaatttgaataatgcgtgctatgatccgcaaagaaatgacttaacctttccagctggaattttacaggcaccattttatgacattaatcaatctcgtggtgcaaattatggtggaattggtgcaactattgggcatgaagtatcacatgcatttgataatagtggagcaaaattcgacgaacatggaaatatgaacaattggtggactgacaaagattttgctgagtttaataaacgagttggtcaaatggttgatatttttgatggcttacaatatggtcctgctaagattaatggtaagcaggttgttggtgaaaatattgctgatctagctggccttgcttgtgtagttcaaactggggaaaatgatggggcggatttgaaagatttgtttgagaattatgctcgtagctggatgcagaaacaacgccctgaggcaattaagactgaagttcaaacggatgtccatgcgccacaaccaacgagagtaaacattccggttcaatgtcaaaatgcattctatgatgtatttaacgttaagccaactgatggcatgtggcttgatccagaagaacggattactatttggtaaaattgaataaaaaaatagtcactggatttcaatttctagtgactatttttgatatgtaattatttatcaagcatatatttacgagtcatcggtaaagttttacctgatggtccctttgtcaataggtattggataacgtcgatgttaccagactcgaaactagcagcacaagcattaaggtacatatcccacattctacagaatctttcaccaaatttcttttctacttcaggacgaacggcattaaagttcttatcccaaatttccaaggttctttgataatgacgacgaagagtttccatatcagtaatttgtaggcctgaatcgatgatgtcagtaacaatttctggtaagtagccaccagggaaaatatacttgtttaaccaagcattagtggcaccaccttgttgacgggtaataccatggattaatgcaacaccgtctttgttaaggtacttgtagacatcagcaaagtatttaggtaagttttctttaccaacatgttcaaacattcccactgaagtaatgtaatcccatttttgatcaccaagttcacggtagtcttgtaatctaacttttgcgacatcttgtaagttatcgtcgtagattcgcttttgaactaatttaaattgctcctcacttaaggtaacaccggtgacttttaaaccgtattccttagctgcagtaagcatcagagttccccagccacatccgatatcaagtagggtcttgcctttttgtgggtggagtttgtttaagatatgatgtacttttgcaatttgagcttgttcaagatcatctttattgccatcttcgaagtgggcgcaggaataggtcattgttgggtcaagccacatcttgtagaaatcattaccaatgtcgtagtggctttgaatatcttcttcgctttgcttttccgtgtgtttttgcttaggcataaacttacggaacttagaagcacgcatgaatgaatcagcactttcataagcaccaacaagcaatttttggatattaccatgaatttcgatttttttatccatgaatccttcgcccaaagctagagaagcatttcgagtgatttcactcattggaatcttttcattaaaaacaatttcaatttcaggatcaccattgccataaacttcgctcttaccgtcccagtaggttaccttaacagaaaaggggaaagatttactaagcatcattttgtaaaaagttttttctaacaattgctttttcctccaatatttaaaacctaaaaattattttaacacttatattaaattgcacaggtaaagaaaaatcagtataaagcaatatttgttttatactgatttttacttatttagcaacgtagtggaaatttggatccatttccttatctaatttgttccaagcatcttcaagttgttgaaataaaatttgttcattttcatgggttagtttagttttacgatcaatggtaattggatcaccaaagttaacttctaatggcttgcgcttaagcagtcctttaaaagttaaagggccttggtagacaacaggtaccattggtttttttgacattttggaaattaataaaactccaccttttaattcagctgaatgtcgcgtgcctgaaggaaagataattaatgataactttccttctctaagtcccttaactggaatctttaaggctgatggtccagggttatttcgatcgactgggaaagcgtgagcatgatcaagaataaatcgtaaaaccggatttttgaataattcaattttagccataaacatgaattccattggactagcacctagtgcaaaaagcagtggttcccaccatgtacggtggggggctactaaaatataattgccctgaggcaagcgatccttatgatgaatgtgtagatgaccgtttaacacccaaacgatgaaacggacaatcggacgtataattttgtaaaacattgtctcctcattgattccttcatttgatgtaagctattataaaaatataatgacgagaaaggcaaatatttttatggtagatctgaaagataatgagcgaattgactacatgtatagcgataatcttcgtattattcaagataaaacggcttttagtttttcaatggatacattatttttagcatattgggctaaagacttgatccgtgataaagataaggttgctgatttatgtgcaggaaattgtgcagctacaatctatatggcttattttaatcgtgcccattatgatgcaattgaaattcaaaacgaagtttattctcaagcagttcgttcagtcaagcttaatgagatggaaaatcgtatttcagtttttcaggataatgtgctaaatgcaggacattttttgcggaaagatagttatgatgtagtaacagttaatccaccatattttaaagcacctaagggacatgaagttaatccagatcgtaaaaaagcaattgctcgccatgaacttttgattaatttagagcaaataattgaagtggctagtggcttacttaaaatgaaaggcaaaatgttaatggtacatcggccagagcgcttaggtgagattgcttattattgtatgaagcatgacttaagcatcaaaatggtgcagccatttgtgccacatcgcggtgaagatgctaatttaattattgtagaagccgtcaagcatactggaactgatggaactgttttgaaagatgctgttgaagttcatgaatcaaatggcgacttcactccattagtacagcgaatctcacgagaaactgcagatgacaaagctaaacatgaagcacagggtaaatattacttttatgtcttactgtgtaatgatggcagtttttatggtggttttactaatgatttagaacatcgtttgaaaatgcacaatttaggaaaaggagctaagtatactaaaacacggcgtcctgtacggatgatttatcatgaacagtttgacgataagcgtttagctttgaaacgagaatattggtttaaacatcattcacgtgcttggaaggaaaaatttttgcatgagcataatataaagttttaatccttgcatactgtaatcttttcttgtagaatatttgagtatgctgtgtcagcatatgaaacttaaaacacatcaagagcaatcatcatcgtggtgcccagggtagtggttagatgatgaaatgaacgcttgagaggatataaaaccataggaggaatttaaatatggcagacgttgttacaatgaagcaattgcttgaagctggtgtccactttggtcaccaaactagaagatggaacccaaagatggctccttacattttcactcaaagaaatggtatctacatcattgatttgcaaaagactatcaagatgttagatgatgcttacaactttatgaaggctgttgcccaagacggtggcgttttcttatttgtaggtactaagaagcaagctcaagattcaattgctgaagaagcaactcgtgcaggtcaatactacgtaaaccaacgttggttgggtggtactttgactaactggtcaactatgcaaagccgtattaagagattaaagcaattaaagcaaatgtcagaagatggtacttttgatgttcttccaaagaaggaagttgctctcttaactaaggaaatggacaagcttgaaaaattctttggtggtattgaagatatgccaagaattccagatgtattgttcgtagtagaccctaagaaagaaaagattgctgttcacgaagctaacattttgggtatcccagttgtagctatggttgataccaacactgatccagacccaatcgacgtagttattccatcaaacgatgacgctattcgtgctattcgtttgattgctggtgctatggctgatgctgttgttgaaggtcaacaaggtcaagatgatgaatcagttgaagttgacttcaaggaaaatgcagacggttcagaagaaatcgttagcgctgaagaaaacccagaagactagattttactattagttccgtaggaggatctattaatggcacaaattactgcaaaattagttaaagaattacgtgaacgtactggtgctggcgttatggacgctaagaaggcattagtagaagttgacggtgacatggataaggctgttcaataccttcgtgataaaggtatggctaaggcagctaagaaggctgaccgtgttgcagctgaaggtttaactggcgtttacgttaatggtaatgtggcagctattactgaagttaactcagaaactgactttgtttctcaaaacgacaagtttgttaacttggtaaatgaagctactaagactattgctgaaggtaagccagctgatatggaagcagctaaggaattgaagatggctgatggtactactttagaccaatcattcgttaacgcaactgctacaattggtgaaaagattgttttacgtcgttttgctttagaagaaaagaatgacgaccaagaatttggtgcttaccaacacaatggtggccaaattggtgttatcactgttttagaaggtgcagatgctgcaactgctaagcacttggctatgcacatcgctgctatgagccctaaggttatttcaccagacgaattagatgatcaatttatcactgatcaattagctgtgatgaaccacaagattgaccaagacaatgaaagtcgtgcattggtacataagaaaccattacctcaccttgtttacggttcagctaagcaattaactgatgatgttttggctaaggctaaggaagacatcaaggctgaacttaaagaagaaggtaagccagaaaagatttgggacagaattattcctggtaagatgcaacgctttattgatgataatactcaagttgacaagcaatttgcagtgttatcacaagactacattatggacgatagcaagactgttggcgaatttttgaaggaaaaaggcgctaagttagttgctttccaacgttacgaagttggcgaaggtatcgaaaagaagcaagaagacttcgctgctgaagttcgtgaacaaatgaagtagtcattattacataattatcatagaaaggaggagtacaccgtgtgctccttctttttttgtaaaaattttgtagtgttttaaatgttaaaagacattgcggcattagatatggtagaataattaaagctattagaggaggtcattatgagtcaagttaaatataaacgtgtcattttaaaaatatcaggtgaagctttagcaggtgacaagggtacggggattaatcctactgtaattggtcacttagctaaagaaatcaaatcagttcatgatttaggtgttgaaattggtatcgtctgtggtggcggtaacatgtggcgtggtgaaactggcgctaagttgggtatggaacgtgctcaagcagattacatgggtatgttagcaactatcatgaatggtttagctttgcaagatggtcttgaaaaaataggtgttcctactagaatgcaaacttcaattgaaatgagacagattgcggagccttacattagaagaagagctttgcgtcaccttgaaaagggtcgtgtagtcatttttggtggtggtactggtaatccatacttctcaactgatactactgcagcccttcgtgcagctgaaattggtgctgatgtaattttgatggctaaaaacggtgttgacggtgtttactcagctgatccaaagactgatccttcagcaactaagttctcagaattaactcaacttgatttaatttcaaaagacttgaaggtcatggatagaactgcaagttcactttcaatggatactgaaattccattaattgtctttaacgttaatactccaggcaatatcaagaaggttgtattgggtgaaaatattggtactgttattagaggtgataaataatgaataacgaaactattgaaaaagcaaaaactaaaatgacggattctattaaggtttatcaaaagagattagcttctatccgtgcaggtgttgctaacgctgctcttcttgataatgtccaagtagaatactatggggcaccaactccattgactcaaatgtctagtattaccattcctgaaccacgtgtattgcttattactccatatgatcaaaattcattagatgatattgaacatgcattgttggcttcaaacttaggattaactctggcaaatgatggtaaggtaattagattagtaatccctcaactcactggtgaaagaagagaagaaattgccaaagaagttggaaaatttgcggaagaagctaaaattgctgtgagaaatgttcgccgtgatgccatgaatactttgaaaaaagatgaaaagaatggtgatattactgaagacgaacaacgtaacttagaaaagcaagtacaaaaagtaactgatgatgctgctaagcagattgaccaacttgctgatgaaaagcgtaaggaaattactcaaggttaaagatgagtaataaggataatgaattaaatcatttagccattattatggatggtaatggacgttgggcaaaaaagaggcatagacctcgttttgttggccatcgagagggaatggataatgttgagcggattactttagctgctgataaattaggaattaaagttttgacactttatgctttttctactgagaattgggctcgtcctaaagaagaagtagcttacttaatgaacctccctgttcgcttttttgataaatacatgccaacattgatggaaaataatgttaaggtaaatatcatgggctatttggatgaattgcctgaaaagacttatcgcattgttcaacgtgcaatgtcagagacggccaataatacaggcttaattctgaattttgcttttaactacgggtcaagaagagaaattacgtctgctatgcaggagctcggtggaatgattgaagctggttcactaaaaagcgaagaaattactgaaaaaatgatttcagaccatttgatgactaaaaactttggtccatatcaagatccggatttattaattagaacgtccggtgaacagcgaatttctaatttcttattatggcaattagcatattcagaacttgcctttagcgaaaaaaattggccagattttgatgaaaatgatttaaaaaaatttgtagaagattataagcaccgtaaccggcgctttggtaaagtagacgaatcggatagttaaatatgaaacaacgtacaattacggcaattattgccttatgtctttttattccaattgtgctcgcaggtggcctttggatggattggctgactgtattattcgcagcagttggcattagcgaaatctttttaatgaagaaacaaatcttagtttcttttaattttttgttagccttacttgcaactttaacctggacagttccagactcattctttaaagtatttccttcaaatatcactaaattaggtgtgttttatggaattattatgttgttcttgacctggactgttctttcaaagaataaaaccacttttgatgatgtaggtgtatatattttggctgcactttacattggaataggttttcactatatggcagccattagagcatacccacaaaacggtttagcattgctgggttgtgtttttgttgttgtttggtccactgatatcggtgcctacatgattggacgtaagattggaaaacataaattatggccagttattagtcctaataaaacatgggagggctcgatcggtgcagttgtttgtgccttaatttgtagtgccatctatatggcaattcttggcagcttgggtattaactttggtgtatctgaattaacgatgattattctggcctttttcttatcaattgttggtcaaatgggtgatttagttgaatcagcttacaagcgtttctatggtgtgaaagattccggaaagattttgccgggtcatggtggtatcctggatcgctttgatagtatgctgtttgtattgccagtagtggctacaattttaggtattgttcattaggagaattttttattgaagggtatactaatctttatcgtcgtctttggtatattggtatttgtccatgaatttgggcattttatcgtagcccaaaagtcaggtattttggttagagaattctcaattggaatgggtccaaagctttttcaaattagacgtaaccccaccacttataccattcgttggttaccacttggtgggtatgttcgtttagcaggcgctgacgatgaaagcaagctggatcctggtatgacggttgttttacaattgaatgaacaaaatgaagtagtgagaattgatgcttcagaaagcgaaataccaattgaaggaattcccgttcaagtaacaaaggctgatctagtagacgatttaataattaagggttacgaaaatggcgatgaaaatgatccagtaacttatcacgtagctcatgatgcaactattattgaaaaaaacggaactgaattaattattgcgcctcgagatacacaatttaatcaagctaatgtttggcaaaagttggcaactaattttgctggaccttttatgaacattcttcttgggtttgtagtatttttaatctggacatttacagttccaggtccagcaacaactacagttggatcaactcaggctaattcaccagcgcgtgatgcaaaaattgtgactggtgatcagattgtggcaattaatggacaaaagattaataattttgatcaagtgtcacagcagattaatcaaagtaaaggcaaggtcttacactttgaattaaagaaaaatggtcaaattaggaaagttacagttaagccaaaagctcataaaattcaaaaacaaacagtttatcaaattggtattgtagctaagagcaatgagaatgcagttgttaaattaaaacgtggctgggatacagctatttcaactaccggtctgattttcagagccgtaggtaacttatttagccactttagtttgaataaattatcaggtccagttggaatttattctcaaacttcacaagtttcacaaatgggctttacttatgtattagcctttttaggaatgatttcgattaatttgggaattgtcaatttaattccaattcctgggcttgatggtggtaaacttttattgaacttaattgaattagttcgcggtaaaccgatttctgaagaacatgaggcaattgttgaattaattggtttcggcttattattagttttaattattgcagttacaggtaacgatatctatcgctattttattaaataattatattttttactttaggagataagaatgcgtcaatcaaaattttttatgccaactttgaaggaagcaccatcagatgcagtggctgaaagtcataagctgatgattagaggtgggtatattcgtcaagtcacagctggagtttatgcttatcttccattaggctaccgtgttttacgcaaggctgagggaatcattgaacaagaaatggataaaattaatgttccagaaatgattatgcctcatttacttcctgcaactttgtggcaagaaagtggccgttacaagaaatatggtgcagaaatgttcaagttaaaagatcgtcatggacgtgaaagcttgcttggacctacacatgaagaaacttttaccgaaattattgctaagaacttaaagagttacaaacaaatgccacttgctttgtatcaaattcagactaagtttcgtgatgagaatagacctcgttttggccttcttcgtgggcgtgaatttgtaatgcttgatggttacagttttgctgcaactcgtgatcaattggatgaacaatttgatgatcaaaaaaatgcatataagcgtatctttaaacgtgcctgtgttactgttcaccctgtaattgctgactcaggtacaatgggaggtaaaaactctactgaatttcaagcccctgctgctatcggtgaggatacaattgctactaatgaaaaaggaacatatgctgccaaccttgaaatggctaagagtattgatactttcaagcaagaaccagaagatgctaagcaattaactaaggtagctacgccaggctgcgatacaattgaaaaattagctaaattcctcgatgtaccagctactagaattgttaaaagtattttatacattgctgatgaccaaaaagttttagtattaatccgtggtgacaagcaaattaatgaggttaagttgggtcatatccttgacgctgatgaggttcatgaagcaaatactgctgatttaaaggaaatcactggtagtgaaaagggtggcgttggtcctgttaatgcagattgggctgataagattattgcagatgaaactgttaagaatctttacaacgttgtagttggtgcaggtgaaaccgattatcaatttgaaaatgctaacttagaccgtgatttcaaggtggatgaatttgctgatattcggactgctaacgaaggtgaaccagatcctgttgatcatttaccgcttaagttcactacttcaattgaagttggtcacattttcaagttgggtacttattacactaagaccatgggtgcagatttcttagatcaaaatggtaaagcaaagcctgtcatcatgggttcatacggtattggcgttactagaatgttatcagcagctgttgaacaacacttaactgaacgtggtgttgcatggccaaaggaaatcgctccatttgcaatacatattgttcaaatgaagatgaataaagaagatcaaactgaattagctgaaaaacttgaaaagaaattcagtgaaaagtatgatgttttatacgatgatcgtaaagagcgtgctggtgttaagtttgctgatgcagatttagtcggtgcaccaattagaattacgattggtaagaaggctgctgatggcattgttgaagttaagcgaccaactgatgacaaagcaaccgaaatgtcaattgatgaattagataagtttgtaaatcaagagttaggataatttttgtggcaaataaaaacgatcttttcttaaaattgctcaaacaggttcaatttcctgatagttttgaagacaatgcgcttctacaaaaagggaaaattgaaaacgtggatgtttacgctaaagaacacaggtgggatatccacgttttttttgatactcccttgatgtatgacacctatgtagcattaagaaaagctgtagaagaaactttttcttcttttgtaaatgtaagattttatgttggaacagctgatggttctgatcaatatttaccagattattggcattatgtagttcaaaattcaaatattttgcaacctgtggctcgtgaatttttggctggccaaaaacctaaaaaagttgatggccgctgggttattccagttgataataatgtgattgatggtttaattgagcagaaggctttagatgatttagctgaagagatgcgtgattatggcttctttaatttgaaatttataactcagctggatcagacaagttctaaaaacaatttagaaagtttgcaggagttgcaacaagagcatgaaaaaagcatgcaggaagtctttgagaagacgccagacaaacctaaaccgcaacaacctaaacagtatccaactagacgtactaattatggtaaacgtaaattagatgaaaatgctccaattacacaaattaaagagctggaagatggcgtacgtaatgtagtaattgagggaaatatttttaatgttgaaactcgtgagcttaaatctggtgcaatcattttttctggcgaaattacggattatagtgattcaattgcatttaagaaatttgtttctaataaagatgaaattgaagagctatctgcaattaaaccaggaacttgggctaaaatgcaggggtcagttgctgatgatcaatatatacatgatgtagtttttaatattagtagcttagagactgtcgagcatgttgggcgaactgaaaaatacgaaggtgagcctaaacgagttgaactacatgttcatactaatatgagtcaggttgacgcaactaatactccgacggactttattaaaactgctaagaagtttggacaaaaggcaattgcgattaccgatcatggtgatgttcaatcattccctgaagcatatagcagtggtaaagcactggacatgaaaatattgtatggtgtagaagctaatatgattgatgatcatgctttactagttttgaatcctgcaccgatgacctatgaaggccgcgagtttgtaatttttgacgttgaaactacggggttgtcatctgtttacgacacaattatcgagattggtgcggttaagatgaagaacggagaagtgcttgaacgctttgataagttcattaatccgcaccatcctttaagtgagcaaactattaatttgacttcaattacagatgaaatggttggcgcagccgatgatgaagcagttgtcattaagcaattccaagacttttatggcgatcgaccactgtgtggacataacgttcaatttgatgttgggtttgttaatgcagcattaagacgtgcagggctaaaagaaattactcagccagtagttgatacacttgaagtatcgcgtttactacatccagagcagagtcgccatactttagattcattagctaagaagtataatgtttccttggaacaccatcaccgggcaaatcaggatgctgaagcaactggctatttaatgtttaaattgttagatgcttttaataaaaagtatcatgaaaataatttgaataatttgaatggctatgcagcacatggtgaagtttataaacgagcccgtccttcccatatgacagttttggcaaaggatcaagctggattaaagaatctttacaaattagtatcaattgccagcacgaaggactttttccgtattcctcgtacgccgaagtcagatttggctcgtttgcatgatggtttactttatggttctggttgttggcaaggcgatgtctttatcgcaatgatgcaaaaaggttacgacgaagcaagagaaaaagctaaattttatgattatcttgaagttcaacctccagcaacctattcgcaattaattgctgatggtttgattaaggatgaagatcaattacatgaaattattgaaaatattattaaattagggaaggaattaaataagcctgtagttgcaactagcgatgcccactacgttgaccaaaaggacgctatttatcgtaaaatcttgattgcggctcagagatcaaaccctagtcgaaataagccacagccagatttgcatttctattcaacacaggaaatgctagatgcattttcattcttaggcgaagatgtggctaagaaaattgttattgacaataccaataaaattgctgatgaattgtcagaaattcagccaattaaagatgggttatacccaccacatattgaacatgccgatgaagaaatgaagaagttgacctatgataaggcttatgaattatatggtaagccattaccgaagattgttaaggatcgaatagatttggaattaaattccattatttcgaatggttatgcggttatttacttgatttctcagcgtttagtagctaagtcaaataaagatggctatttggtaggttctcgtggttctgttggctctagtctagtagcaacgatgtcaggaattactgaagttaatccgttagctccacactatcgttgtcctaactgtaagtattcacaattctttgaaaatggggaatatggttctggttttgacttgcctgataaagattgtccaaaatgtggaactccattagttaaagatggacaagatatcccatttgcgactttcttaggatttcacggcgataaggttcctgatatcgatttgaacttctcaggtgactatcaaccagtagcccataattttattcgagtaatgtttggaccagataattcatatcgtgctggaacgattgcgactgttgcggataagactgcttacggttatgctaaacactacgatgaagagcatgatttaaagctaagaaatgcggaattagaccgtttggcagctggtgtccgtggtgtcaaaagaactactggtcaacaccctgcaggaattgttgtagtgcccgatgatatggacatttacgattttacgccggtatcgtatccagccgatgatgtaaatgccgcttggttgattactcactatgacttccactctattcatgataatattttgaagtttgatattctgggacatgatgatccaactatgattcgtcacttgcaggatttgtctgggattgatccattgactattccacccgatgaccctggagtcatgtcattattttctagtcctgatattttaggtgttactccagagcagattcaatcagaaactggaactttgggtgttccagaatttggtacccgttttgttagaggaatgcttgaggagactaagccaacgacattttctgaattattacagatttcaggtttgtcccatgggactgatgtatggctaggaaatgctgaggacttaatcaatcaaggaatttgcaaactgaaaaatgtaattggttgtcgtgacaacatcatgatggacttaattcactggggcgttaagccagaagttgccttttcaacaatggaatccgttcgtcatggtcgtggcatcagcgatgaaaatatggctattttaaagaaaaataagaatattccagattggtatattccttcttgtctgaagatcaagtacatgttccctaaggctcacgctacggcttacattttaatggctctacgaattgcttggtttaaagtatattatcctgaaatctattacacagcttacttttcagttcgtgccgatctatttgatttggttgcaatgagtcatggtaagaatactgttaaggctgcaatgaaggaaattcaggataaaggaaacgatgcatcagctaaggataagagtttgatgaccgtgctagaaatagctaatgaatgtctagaacgagggattaagatcaaaatggttgatattgatcaatctgaagcaactgactttaagatcttagataagcatacaattttagcaccgttcaatgctgttcctggtttgggggataatgcagctaagcagattgtagctgctcgtgcagaaaagaagtttttgtctaaagaagatttagctaagcgcggtaaagtatcacaaacaattatgaattatttcgaagaaaatggtgtcttggaagggatgccagatgaaaatcaattatcacttttctgatagttaaattttacaagatcaggtaaaacatggtatactacgtatgaagttcgaataggtaaattcgagtgagcagtgatgctcactctttttattacggaggaaaatttttgtctaaagttatagattctgttcgtccagttgtcgaaacaattattgatgaacatggtgacatgttggttgatatggaatacgttaaagaaaaagggcaaaattatttacgcatttatgttgatcgccaaccaaacggtattgacattgatgagattgcagctttaagtgaacttgtttccgaaaagctggatgctcttgatcccgatccacttccagatccctatgttttggaattatcatctccaggggcagaacgaccaatcaaaacaaaagctgattgggaaaaagctctgaatgattacattcatgtcggtctttatcaaaagattgagaataaaaaaatgtatgaaggtacactcaagtcttataatgatgacgaagttgtattagaaataaaagataagacaagacgaaaaacattaactgttccccgtaagttaattgcaaatattcgttttgcaattgaattttagaaaggttgatcaaaaacttatgtctaaagaaatgctagaagcgtttgctactttggaaaataccaagggcattaagcaagatgttattgttgatgcaattaaagccgctttggtagctgcatacaaaaagaattataatcaagcacaaaacgttgaagttgattttgatgaaagaaaaggtaacttcaaggtaatggcagttaaaactgttgttgacgaagtgcaagatgaccgtcttgaagttagtttaaaggatgctttaacaattaatcgtgcttatgaagtaggcgacgaaattcgttttgaagtaacacctaaaaattttggtagaattgccgcccaaactgctaagcaagttatcatgcaacgtctacgtgaagccgaaagaaaacatattattgatgaatattcacaatatgaagatgaattggttactggtaccgtggaaagacgcgacaatcgtttcgtttatgtaaagattggtaatgttgaagctgttatgcctcaccgtgatcaaatgccaaatgaggtttacaatccccaagaccagattcgtgtactagtaactcatgttggctccgatagcaagggtgcacaaattacagtctcaagaactgctcctgacatggttaaacgattgtttgaacaagaagttccagaaatttatgatggaaccgttgaaattgtttcaatcgcacgtgaagcaggtgacagaactaagatggctgttaagtcaaatgatcctaacatcgatccggtaggtacctgtgtaggccaaaagggtgctcgtgtacaaaatgtagttaacgaacttggcggtgaaaatattgatatcgttaagtatgaagaagatccatctgactttattgctaatgcattaaatccagcagaagtgattgcggttcaatttggtgatgatgaagaagaaaaaagtgctttagttatcgtaccagattaccagttatcacttgcaattggtaagaaaggtcagaacgttcgcttagctgctcgtttgacaagctataagattgatattcgtcctgaatctgaagtagaatttgtagatgaaaaaacaaatgatacagctgatgctgcagatagtagcgaaacttctgaaaatgttgaaagtacagatgacgctgctgacgttgaaagctcagatgatacaactactgtagaagattcaagtaaagaagataaaactgaagaataggtgattttttgaaaaaaagaaaaatcccaatgcggaaggatttattaaccgatacaatgcagcccaagaaggaattagtacgtattgttatcgataaagaaaaaaatgtgtcagttgatccaacaggtaaaaaggctggtcgcggcgcatatgtttcccttgatccaagtaagattgaagctgctaaagagaagaatgtattagaacgtagtttaggtgcgaaagttccagatactttttacgatgagctttactcttatgttgatcatcaaaaggcaagaaaagaattatttggtgataaataagattgcaaaatagacaaaaagcaattaatttgttaggtttagctgagcgtgctggtaagttaactaccggtacagagacagtcattaatgaacttaataagcacaaaatcaaagcggttattatggctagtgatgttcaagacaacacggcagaaaaagtaaaccgcgctgccagaaaagacaatattcctatgataactatgtttactgccattgaattgtcaaaggcaattggcaaaaaacgcaaagttttaggattaactgatgctggttttgctaaggcgttagttaaaaaaataaatgaaggagtgtgattggatggcaaagaaaagaatttatgaaatcgcaaaagaagtcggcgttgataacaaagttgtagtccaaaaagcaaaggatttaggcttagatgtaaagaatcacatgtcatcagtagatgattcacaggttgcaaagttaaagaatagtttccaaaactccgctcctgctgcaaaatcttctaataaaaagaataaaataaaaatctctgtttcttctattcgcaaaaatgaaaagaagcaagaagataataatagttctaagaattctaagagacgcaataataaacgtcgttcaaataatcacggtcatgagaataaaaatgatcgtagaaataatacaggtaagccaaaggcagctgctttgttacaacaatttaaacaaaagcaacgggcagaagaagggcaacttaatcgtgaagcccaaaaagccagaaaagaatatcatgagcaattaagacatccaaaacaagaacagccagtgaaagataataagaaaacaagcaaccacaaagataacaagaagaaagcagaaccagtagaaaagaaagttattggtcctaagattttaaagccttctccagctcgtttgaagaagcaacagcctgaagcgactaaagaactagttcaagttactattcctgaggctcctaaggaagaaaaacgcggcaataatcgtggtcgcaacatgggaaagccaggacgcaagggtaaaaatcaatttggcaatggtcgtagtgaccattcagatcgttcagagagaaagcggcgtaagaataaaaaacgtcaacaagagcaaaagccaaagaaaacacttactaagcgtaaggaacgtccattaccagaaacattagtttacgaagaaggtatgaacgctcaagatattggtaagttaattcaccgtgaaccagctgaaattgttaagaaactcttcatgcttggcgtgatgactaaccaaaaccaatctttggataaagatacaattgaacttttagctgctgaatatggtatcaatgctgagcaaaaagttcatgaagacatctctgatattgataatatctatgacaagagaatggaagagtcaaaggaatctaaaaaccaggttaaacgcccaccagttgttacaatcatgggacacgttgaccatggtaagaccactttacttgatcgtcttcgtcatactcatgtttcagctcatgaagctggtggtattactcaaaagattggtgcttaccaagttagattagatgatcgcttaattacattcttggatacaccaggacacgcagcattttctaacatgcgtgcacgtggtgctgaaattactgatattgttgtactggttgttgctgcagatgatggtgtaatgccacaaactgtagaagcaattgaccatgcaaagagtgctaatgttccaataattgtagcaattaacaagatggataagccaggtgcaaatccacaacacgtaactgaggaattaatgaaatacaatttgattcctgaagattacggtggtgatactatcttcgttaatatttcagctaagacaggtcaaaatgttgatgacttattacaaatgatcttgttgcaatctgatgtgatggaacttaaggctaatccaactgaaatggcaattggtactgtgattgaagctcgtttgtcacgtggtcgtggacctgtagcagacgttttaatccaacaaggtacacttaatgttggtgacccgattgttgttggtaacacttttggtcgtgttcgtactatgactaatgatcgtggacgtcaagttaagaaggctacaccatcagaacctgttgaaattactggtttgaacgatgtgcctgaatctgctgataagttagttgaatttaaggatgaaaagaccgctagaagtgttggtgaagctagagcacaacaagctttacaaaagtctcgtgaaaatgttcaacacgtaactcttgataacctcttcgatactatgaagaaggaaaacatgaaggaagttgacattgtcttgaaggctgatgttcaaggttctgtagaagctttacaacaatcgcttgaaaagattgaagttgaaggcgtacgtgtaaatatcattcactcaggtgtaggtgccattaatgaatcagatgtaactttggctggtgcatcaaatgcatttattattgggttcaacgttcgtcaaactgctactgctaagagccaagctgaaaccgatggcgtagatattcgtctttacagcattatttacaaggctattgatgatgttactgctgccatgaagggtatgcttgaaccaacttatgaagaaaaggttatcggtaatcttactgttcgtgaaacttggaaggtttctaaggttggtacaattgctggttccttcgttgataagggcttggttaagaatgattctaagattagagttattcgtgatggtatcgttaagtatgatggtgaaattgcttcacttaagagatttaaagatgatgttaaggaagttaagcaaggtaacgattgtggtttaacgattaaggactacaacgacattaaagttggcgacgaattcgaagtttacgaaatgcaacaagttgagcctaagtaattactattaggaggaaaacatgaagcatagaattggtcgtgttgaaggtgaaattctacgcgaattaaccaagattttacaaaagaatattcgtgatccgcgcttaagtggtgtaactattaccgcagttgaatgtacgaatgatctttcatatgcaactgtttattacagcctgctaactgaagatgagcataaggaagaagaggttcaggcaggttttgaaaaggcaaaaggcatgatgcgtcatttgcttggtcaaacattaactgtttataaggttcctgaattaatttttaaacgtgataattcagttttgtatggtagtaagattgaccgtttgattgcagaagttaagaaacaagatgctaagcgggaaagcaaataaaaaagagggcgccgtgatggtgccctttttttgttgaaaagaatagggaataattatgttaaacggaattttagttattgataaagataaagggatgactagtgcagatgtagtttatcatttgcgccgcgtattacatattagaaaaataggacatgctggtacgcttgatcctgaggtgacaggcgttttaccaattgctattggtcaggctactaaattaattgaaatgatgcatactaggccaaaagaatatattggcacgggactatttggttatagcacagatagttatgatgcaactggaactgttttaaaagaaaaaaagttgattcagcctttttctggtgcagaaattcaagaaaatatgaataaatttgtaggagaaattgttcaagtgcctccaatttattctgctgttaaagtgaatggtaaacatctttatgaatatgcacgtgaagagattgaagtcgagcgacctcagagaaaggttgaagtcaaacaatatgatctaactaaagaaccagtttttgatataaatactgggcaagaaagctttgattttaagattaaatgcagcaaaggcacttatgttagatcgttagttaatgatctaggtgaaaaattagattgccccgcaacgatgacttatttgagaagaacagctagttctggctttgatattacacaagcagtaaaattaaaggagattgaagagaatccgaaaaaggccactgaacttatacagccgattgatgcattttttaaggaatacactcaggttgatttaactgaagaaaagtggcttaaagttaaaaatggagcgggtatttcgcttgaaactaatgcgaaaaaagttgcactacgatacaataaaaaggtgaaagcaatttatgaaaaaaaaggaaagctttatcgcccaagcttaatgctgttgcaaaatgaataaatgaaatgaaggaattagctgtgaaaatcgttcatttaacatatcctgttaaggaaaatattttatctactagaattgtgcttgcccttggcttttttgatggggttcatttgggacatcagcgcttaattaatcaggctaaagaaattgcattacagaagaaattgtcattagttgtgttgacctttgatcgacatcctaaggaagtttatgagtcgaaacgagattttaaatacttagaaactttggaagaaaaagctaacaaaatggcggaattaggagtagattatttggctgttttaccatttactaaaaatttcagtcaaatttctgcacaagaatttgtcgataatgtaattgtcagattaaatgctgataccgttgttgctggctttgattacacttatggttctaagaatattgcaaatatggctaatttaccccaattttccaaagggcgttttaatattgtagtgatgccaaagcaaacttttaacggtagaaaaattggctcaactgaaattcgtcaagcaattaaggatggtcagatgaaattagccactgaattaatggggcaccattatgtaatgagtggtatcattgggcatggtaaacgaaatggtcataagctaggctatccaacagctaatttgatttgggcagaacataaggtgattcctaaaattggagtttatgctaccaagactaaagtaaatggtaagtggtataactccatgactagcgttggctataatgtaaccattaatcaggacaagaagatatatattgaatctaatatttttgattttaatgaagatgtctatggtaagccaatgaagatcaaatggtataaatataccagaggtgagaaaaaatttgccggattacctgaactgaaagagcaacttgaacgagatgagcaagaaattagggcttattttaagcaaaagggttaagaagctacgtactttgaaaaaagtgcgtattttttgaataaaattagcaatctacttgatttagtgctaatttctggtatcatattaactgttagcacctgagagatgtgagtgctaaaagtgagggcgatataatatgttgaccgagcgtcaagagcttattttaaaaacaataattacaaactttacacaaagtcatgagccagtaggctcaaagaccgtaatgaagcagttgccaattaaagtttcaagtgcaacgattagaaatgaaatggccgtgttggaagagcaggggttaattgaaaaaactcactcttcaagtggtcgaattccttcaagcgagggctatcgttattatcttgataatttagttgagccgttgcaattaccagagtctgtttataatacaataggaagccaattagatcgaccttttcatcaagtaaatgaaattgtacaagaagctgcacgaattctgtcagatttaactaactataccgcatttgcggaaggacctgagagtcatgatgttagagtcacaggatttagaattgtaccgctgtctcaacgacagattatggcaattttggttacaagtgatggtaacattcaaaatcaggtatatgctttgccacataatattcacggcgaagaaattgaaaaggctgtccgcatgattaatgatcagttagtcggaaagagcctaaatgaaatcaacgtttcgttgctaagtgaattagctaaaaacgaattaggcggcgaacatgtgactgaattgcttagtttagttgaagatgtcgtaaaagatgcagctagtgagcagatgtatgtggatggacagattaatttgctcaataatacttctgaacatgatgtaaatgacattcgttctttgtacgagttgattgatcataataatctgttcactaatttaatggatgcaaaggtggatccaaagtctggaaattatccagtaaaggttaagttgggatctgaattacccaatgatttattaaaaaattatagtttgctgacagctgagtacagcgttggctcccatggtaaaggaactattgctttacttgggccaacgaatatgccatattcacaaatgattgggttgcttgaatattttagaaatgaactagctaaaaagttgcttgattattatggcaagtttcaataaaggaggttagccgtgagtaaagaagaatttccaagtgaaaaaaatctagagcaaaaagaaaagacttctgagcctaaggctaaaaaagaagccgataaaggtgaagaaaagaagcaagaaaaaaataaacaagatcaaaaattagctaaagaattagctgatttaaaagataagaacaaggatcttgaagataagtatttgcgtagtgaagcagaaattcaaaatatgcaaaatcgctacactaaagaacgtgctcaattaattaagtacgaatctcaaagcttagcgaaggacattttgccagcaatggacaatttggaaagagccctaagcgttgaggccgatgatgatgtgtctaagcagttaaagaagggcgtgcaaatgaccttggatgcacttgtgaaggcaatgaaagatcacggtgtagttgagattgaggctgatggcgttaaatttgatccgacattacatcaagctgttcaaacagtagcagctgagaatgatgatcaaaaagatcacgttgttcaggttttacaaaaaggatatcaatataaggatagaacactaagaccagcaatggttgtagttgctcaataagagaggaagctaatatatgtcaaaagttattgggattgatcttgggactactaactcagcagttgcagttcttgaaggtaaagaaccaaagattatcactaatccagaaggtaaccggactactccttcagtagttgcatttaaagatggtgaagttcaagtcggtgaggtagcaaagcgtcaagctattaccaaccctaataccattgtttcaattaagcgtcacatgggtgaagctgattataaggttaaagttggtgataaggaatatacaccacaagaaatttcagcatttattttacaatatattaagaaattctcagaagattacttgggtgaagaagttaaggatgctgttattactgttcctgcttacttcaatgatgctcaacgccaagctactaaggacgctggtaagattgctggtttgaatgtgcaaagaattattaacgaaccaactgcttcagcattagccttcggtttaaataaagaccaagatgaaaaagtcttagtatacgaccttggtggtggtacttttgatgtttctgtattgcaattaggtgatggtgtcttccaagtattgtcaactaatggtgatactcatcttggtggtgatgactttgatcaccgtatcatggattggttaattaagaactttaaggatgaaaatggtgttgatttgtcgaaggacaagatggcaatgcaacgcttaaaggatgctgcagaaaaagcaaagaaggacttgtcaggtgtatcaagtactcacatctcacttccattcatttctgctagcgaagctggtccattacaccttgaagcagatttaactcgtgctaagtttgatgaattaactgctgacttggtagaaaagactaaggtaccatttgacaatgcattgaaggatgcaggtcttactgttaatgacattgacaaggttattttaaatggtggttctactcgtattccagctgttcaaaaggcagttaaggaatgggctggtaaggaacctgaccattcaattaaccctgatgaagctgtagctatgggtgcagcaattcaaggtggtgttatctcaggtgatgttaaggatattgttttacttgatgttaccccattgtcacttggtattgagaccatgggtggtgtcttcactaagttaatcgacagaaacactactattccaacttcaaagagtcaaatcttctcaactgcagcagataatcaaccagctgtagatgttcacgtattgcaaggtgaacgtccaatggctgcagacgacaagactcttggccgctttgagttaactgatattccaccagcaccacgtggtgttcctcaaattcaagttaccttcgatatcgataagaacggtattgtaaatgtatctgctaaggatatgggtactggcaaggaacaaaagattactattaagagttcatccggtttatcagatgaagaaattaaacgtatgcaaaaggatgctgaagaacacgctgatgaagataagaagcgtaaggaagaagcagaccttagaaacgaagtagatcaattaatctttactacagataagactttgaaagatactaaggataagctctctgatagcgatcgtaagccagttgaagatgctcttgaagctttgaagaaagcccaaaaggacaacaacttggatgaaatgaaagaaaagaaagatgctttatccaaggctgctcaagacttagctgttaagttgtatcaacaaaatggtggtgctgctggtcaagctggtccacaagcaggtcctcaaggcccacaaggtggtaattcaaataatggcaacaacggtaatgcccaagatggtgaattccacaaagtagatccaaataagtaatgggtttataattaaacaaaaggagaaaagaactacccattgagtagttcttttcttttgagaatacaaggagttcaaatagatggcacaagaagattactataaagtacttggcgtagatcgtgacgccagtgatcaggaaataagtagggcatatcgtaaattagccaaaaaatatcacccagatttaaaccatgaacctggagctgaagaaaagtataagcaggttaacgaagcctatgaggttttgcatgataagcaaaaacgtgcgcaatatgatcaatttggttctgctggtgtaaatggtcaaggtggctttggtggtggagctggtcaaggctttggcggtgccggatttgatacttctggctttggtgattttggcgatatctttggcgatatttttggtcaaggccgtcaacagagggttgatccaactgcaccacaacgtggccaagatttggattatcaattgacaattgattttatggatgccattaagggcaaaaagacccaggtcagctatactcgaagcgaaacttgtgaaacttgtggcggtaatggttgtgaaaaaggtacacatccaattacctgtgataaatgtcatggaactggttatatgacaattactcaacaatcaatgttgggcatgatccgtcgtcaaaccacttgtgacaaatgtcatggtcgtggtgtgattattgagcatccatgtaaaacctgtggcggtaaaggaacagttgaccgtaagaatactattgaagtggatattccagcgggaatcgacaatggtcaacaacttagatatcaaggccaaggcgaagcaggtataaatggcggaccatatggtgatttatatattaactatcgaattaaaccatctaaagattttgagcgtcgtggccagactatttatacagaagtaccaatctcatttgctcaggctactttaggagatgaaattaacgttaagactgtgcatggtgatgtaaagctaactattccagctggtacgcaacctaataagaagtttactttgcgtggacagggtgtgccatatcttcgtggtaatggcaatggtgatcaaattactacagttaatattgttattccaaagcacattaatgataagcaaaagaaagatttgaccaactttgttcatgatggtggtggcaatattacaccacaagaaaaaggattttttgaacgcttaaaagataagtttaatatgtaaatgctaaaaaggtttctgctacttgcaacagaaaccttttttaagatcaattaattttttggtgatttttagagtttttcttggaaaatattcaatgctgaattttcaattattattctaaaaactctgcattttattgaaaatttactatgctacaatttcatcatttattctagctttgctataattaatacatagtaaagggtgaacgattttatggatttaaaaaaattaaaagactatcaaaaacacattcgaaattttgctattgtggcgcatattgaccatggtaaatcgactattgctgacagaatcttagaattaactgatacagttagtcaacgtcagcttaaaaatcagatgttagatgatatgccacttgaacgtcaacgtggtattaccattaaaatgaactcagttgaagtgaaatatcatgctgaagacggtgaagactacattttccacttaatcgatacaccaggacacgttgacttttcatatgaggtatcacgttctctagctgcctgtgaaggtgctttaatggtggttgatgcttctcaaggtgtacaggctcaaactttggctaatacttatttggcaattgatgatgatttggcaatcttgccagtaattaacaagattgacttaccatctgccgatgttcctaagactaaggaagaaattgaagaaatgttaggttgggatgcttcagaagctgccgaagtttcaggtaaaaccggtcaaggtattaaggacatgctggaaaaggtagttaaagatattccagctccgtctggtgatattactgctccattaaaagcattgattttcgactctaaatatgatgattatcgcggagtggtaatgtctgtcaaaattgaagatggatctattaaaccaggcgatcgaattcaaattatgaatactggcaaggaatatgaagtcacagaggttggtgtttctagtcctcatccaattaagaaggatattttaatcgcaggggatgtaggatatattactgctaacattaagtccgttcgagaaacacgtgttggtgacacaattactcaagctgataacccaacggctgaaccacttccaggctatcgtcaaattccaccgatggtttattctgggatgtacccagttgacaaccgtgattatgaagatttgaaggaagctttacaaaaactacagctgaatgatgcagctttagaatttgagcctgaaacttcaacagctttaggctttgggtttcgttgtggcttcttaggcttacttcatatggatgttgtacaggaaagattagagcaagaatttgaccttgatctaatcatgacagcaccatctgttgattatcatgcaattatgaatgatggaacaaccaaggtgattgataatccatctgatttgccagatgctggtgaatataaggaagttcaagaaccttatgtaaaagcggaaattatggtgccaaatgattttgttggtccagtaatggagctttgtcaacgtaagcgtggtgaattcgttaccatggattacttggataagtaccgagttaatgtaatttacaacatgccattagctgaaattatttttgatttctttgatgatttgaaatcttcgactaaaggttatgcttcacttgattatgaaattacgggttatcgtgctactgatttggttaagatcgacattttgcttaacaaggagccaattgatgcattgagttttattgctcacagatcagaagctcaagatcgtgcccgtcaaatgacttcaatgctaaaaaaactaattccacggcaaaactttgaagttgatattcagggcgcaattggagctaaaattatttctcgagctacaattaagccataccgaaaagatgttacctggaaaatccatactggtgatccagatcgtcgggctaagctgcttgaaaaacagaaacgtggtaagaagcgaatgaaagcagttggtagagttgaagtacctcaagatgctttcatggcagtcttgaagatgaacgatgatgacatcaacggtaaataaaaatggctaaaaataaaaaaaatagtgtaagtacaattttacttagagttgctgctatcatattattgcttgttggtattgctttgatatttaacaaacagatcagtgatcaattaattcatcataatcaacaatctactttaagtggaataaatagaaagacaattgaagaaaacaaaaagaaaaaaggaatgtatgattttagtaaagttaagtctttaggcattgcacaagcagcaagatcacaagtgaaaaagacttctggtgcgattggtgcgttagctattcccgatgttaatatgtatttaccgattatgttggggatgagtgatgatgcaatgtcgactggtggcggcacgatgcgagccgaccaagtaatgggtaagggaaattatcctcttgcaggtcactacatgacagcaaaaggtattcttttctcaccacttgaagatgttaaaaaaggtgagttagtttatttaactaatcttaacaaagtatatgtctatcgaatttatatgaaaaagattgttgatccaactgcggtttggctagtcgataatactaagaagaatattgtaactttgattacttgtgctgatggcggtaagaatcgttgggcaattcggggtaatctgattaaaactgaaaaggctaacaacaataatcttaaggtttttaaattaaaataaaaatttacaatctttaatcagatttagatttgcgataaaattataaatagattttgtaataaagacactcaacaatgagtgccttttcgttttgatgagagaacataaggtgtttgataattaatgaaatggcaagaaagaacagctgatgaattagcaccagacttgattgagaaatatcaactaggtcccattgcagccaaactttttgcattgcggggtattaatacagacgaaaaacttgatttttggtttaatgcaacagaagaaaatctggctgatccagcgttaatgcatgacatggataaggcaattaaccgaattaatcaagcaattgatagcggcgaaaagattacaatttatggcgattatgatgctgatggaattactgcaacgactattatgactgaaaccctaagcattttgggcgctgatgttcattattttattcctaatcgcttcaatgatgggtatggtcctaatatggaccgctatcaagatattgtagctgatggaaccagattgattatcactgttgataatggtgttactggggtcgaggaagtcaaatatgctcaagaacataatgttgatgtaatcattacagatcatcatacttttcaagaaaagaaaccggcagcttatgctactgttcattgtaattatcctggccaaaaatatccttttgatgattattgtggtgccggagtagcttacacgatttgtcgtggtctaatgcaggatactatgcctgagctgctagatttggctatgatcggaactattggcgatatggttaaggtgaccggagaggggcatattatcgttaagcgtggtttagaaatgcttaatcagacagatcgtcctggcttgcgcgctctaatcaaaaatgctggtttgactttaggcagtattaatgaaactgatgtcggctttaatattgctcctcgattaaatgctgtaggtcgattagataatgccaacttggcagttgagcttttgctaagtgatgatgaccttgaggcccaaaaaattgcagataagatcgaagaattaaacaataaacggaaagaattaaccaccgaagtctatgacaaatgtatgacgttaattcataaaaatagctggcaaaaacaaaatactttggttttatatgaccctgaatttcacgaaggtgtgttaggtttagtagctaataagatcgttgaaaagacacataaacccacgattgttttgactaaaaatgatgcaggtgaggttaaaggctcaggtaggtcctttgctggtttcaacttgtttgatgctttaaatccgatcaaggatcaatatttaaccaaatttggtggccatgattttgcctgtggtttatcattagaagaaaatcagattgcgccattacgggaaaaatttgaagatgactttcatgttgaaggtggtcttgagactaaaaaatatgacatggaattgcctatgcagggcttaactccgcagacactagcacaaatcaatcaagtaggtccatttgggacaggtgacacgcagccaatctttagtatctctaatccaacaatcactcatttctttaaaatgggtaaagataagaatcatgtcaaatttacggttgctaaaaaaggcggtaacttatcagttattggatttaataaaggctttttgaataataatcttttgccgtttatttctcaaatttttgttcaattatcattaaatacttatcgaaatcaagtttctttacaaggaatcatgaccggactagcttttgcttcaccaaaattggcagtgccaacgccagttgttgacttacgccaagagaaatatgttatgggtttcgcggaccgctacctgttatttgatcaaaaaaatattccgattgttcgcaaccgactacagatcgatgaagacaagatctctttagttaaagattatgatcaaactggtgaaacagttgcattattagatgtgccacgcaatcagattgaattaaatgctgcattggagaaagattatcaacaaatctatttacgctttttgcttgatcaattgcctgttgaacaaattcccgctaaaaattattttggtgctgttttaaaatatatttatagtcaccctacgttaaagccagcagattaccgtacagttgcaccttatttgggactagattatgatagtgtgcttttcattttacgagttttctttgaattaggctttgtaaaattggatgaaggtaaattggtaggagagccttctcctaaaaaacagccgctgacagcttctaaatatttaatgggaacttcttctcagattaaatttgttaatcaactaagaactatgcctagtcaacgtttgattacatatgttaataatttgacaaataaatagataactattctgttttcagtgcttttatcgttaaaatttgttaaaatatactggtcaaaagcgtttgaacacaaacacagagcattttggaggttatgcttcttatggcagttgattttagtaaatatattgcaagtgttaaggattttcctaacaaaggcattgtttttcgcgatattacaccaattttgcaagatggtgaattgtatcgtgccgctactcatgaattagcggaatatgcaaagagtaaaaaagcagatgtaattgttgggcctgaagcacgtggttttattgtaggttgtccagtagctactgagttaggtttaggttttgtacctgcaagaaagccacataagttaccaagagaagttgaacgtgcttcctatgatttggaatatggttcaaacagtttggaaatgcacaaggatgcgattaaacctggacaaagagtggttgtctgtgatgacttgatggctaccgcaggtactttaagagcttctaaagagctaattgaaaaccttggtggtaagttagttggtgccgcattctacatcgaattgccagatttacacggtagagataaattacctgatgttgatatttattcacttgttcaatatcatggtgcttaaaatagaataaataaaaagagggaattaaatcaatttgaactgagacctaaaagttagacacttttaggtctttttctacgtaaagtcaagcataataagaagtttggcttcattttttgtttaaatttcaacttaaacatcttttagtgtcgatttatttttttagttagacacgacaaataagcccagatccatatctgatttttgggcttagcgttataatgtacttgatcaattaattacgactaaagtctttttgattatgtgtggctacgttgtaatcatatggttgatcattgataatcagggcataaatggttctgattagtttatgaattgaagcaatagctatctttttgaaccctttggtttgagaggatagctttttgctttcataataatctgctatatgacacggatttgtcttagctgcattatcaatttgtccaatagctcgataaagcaacttacgtgcgactgcattgccatgtttagtaatacttaaattagagtccatttctcctgactgatatctgcctggatcaattccgataaaagcattgattttattaggattactaaatctgcgtaaatctcctaactctgctaaaactctgacagcagtggtctgtgcaaagcctggaatgctttctaggttttctaaatcatgattaggcaaagacttcgctaacttaaccattcttgcgattaaattttctctttgatcacttaaattaagcaatctgtgtgcataatactgcacttgctcgacttctatgctagagcaagatacaactggataagcttgataagctaattcaattaatttatctgcagtccttagagcgtgtttaaaagcaatcccctttaagctcattaaccagttaataagctgttttttatcttctcttcttactaagtcacaatgaggatatcgcacaactatttgccagtaatttttacctctagcagaagaaaataaattttcaatttcaggaaaagtcgattgtagagcttggtgaagtcgatttttagctattaccaagtcacttgtcagctggtcatagaagcggctcaaagcattaagctgcttataagtttgggattcgctttgattaaccggatggcgataaagtctttgaattaaagctaaatgataagcatcagttttatcggtcttgttgtagcgtagccccatattcatctcttttttggctttaagcggattaataacaacatattcatagccgtagtcttcaagaaaagcctgcagtctgcgtgaataaacaccggtagcttcaaaaataatttgcggatgtttagaaaaagcggttaattcatgaagcaattgaataaaaccaggacgattattagtaatggttagttcatttttgctttcaccaattagttcacaaacagtagaagtagacttgcttacatcaattccaaaagtaacttgcataataaaaacctccaaaacttagtagtaaaacgtatttacttaagaaatcagatctaattttctaaactcgacatctagtgtccacattcttcgaagagactattgaaaacttaagtaaaactgccagtttattatgcgacatcaagtgtctaaagacctcagggcatatcgttttaccactactttaattctacaaaagaataaaaatagtgaatcaattatcccgtcgaaactgtcaaatcttttgtgtaaatagatctttctcgtaaattgattttttaattatttatttaatcaaagtaggattctaaggtgtcctgaacctgaccaaagcctttatgaattcgattgaaataacggtcattgtagctcattgcctgaatgccaataaaagcatcaagcgactgttcagttggaaactctgccttaggcttagctttgcgcttgatcacattgttaaatgattcaatcatgttagtcgaataaattgaagctctgatctgcttgggatagttataaaagaccagcagatctggttctatgtctttcaagcttctgataacatggctgtaaaccttgccccatttggtatagaagtcatgcaggacagctgtggcttcttctttgtttgtctgttgatgcacctgtttgaattcgttcatgatcttttcacgatcgtcgacgcgtactttagcgcagatattgcgcatgacatgaaccaaacagcgttgaaaatgagctttaggataagtcctggccaaggctgttttcatgccaacaacaccatcagaaagaaaaagctcaacttgctttaagcctcgggatttcatgttttgaagcatatctgtccagacttcaatgttctcgctaggcgcaatgcagtagtcaatgacctccttgtgcccattaggcttgatgccaatggcaatatagactgcttcacgctcaaatgtttctcggcgcaaaggaaggtatgtcgcatccaaatagacgcagaaaaacttgtcgcttagcttgcgtttgtggtaagcctcaacctttggaatcatctgcttggaaatatttgatacctgagctggactgtaatggctgccatacatcttttcaattagatcggctatgtccctggtggtcacgcccttggagtaaagcttgataatcatgctttccaagatatccgagtgctgcttgtagtcaggcagcgtgtgctgatgaaattgaccgttgcgatcccggggcacttgcacttcaattgggccaaattgcgtatcaactttgcggaaataagcaccatttctagagttgccagtattccagccatttctggcatagggatcatagcccagaaaggcggtcaattcagcttctaacaagttattaacagcctgttgtagctctttgcgcaataaatcatttattttgtctggattgaatagagcttgagcaaaatctttggtaaaatcattcatgaaggagttcttctttctgtatgtgtttttttgttcaaaccaatcatacgagaaaggaactcctttttctaatgtttaaagaaataaatttaaggaatcattcatccttacacaaactattttacagtctcatcccgtcggataactaattcactatttagcttagaatgtttattatttgttaccgattaatttaaattttgaccatggtttaataaagtcgagcaggaataattcgtctgatctaatagaaccgactttgttcatccttgactccttatgaggttcaaggacaatttgtagttcatttttgtaatgaccaaagttgtcgttaccaatgataatatctccgcgttggaattctacattgttgtcgtgtactggattaggaatatctgcataagttacacggggcatggttgaacgaattacatccttagtgatatcaccacgacggaaatgttgaggcgcttctacgatagttttctcaatcttattaacatcagtaacgtagtttacgtgcaacatcaattgatagcgattaactttagataaggcttttaactcggcttcactggcataagcattaccgatgattacatcatcaatcaacccagaagcccagagatgcattgcttgcacatcaattggtaaattacggtcttgctcaagcgttggtaaaccatcttccacgttccaaggtcccatttgacctacttgacttgagacaaaagcggctgaatgaatgccaaactttttgaagcgttcagaacaagcgataaagaagtcgtaaggtaagccagtaccgcgttgaggataaaaattgtgacagccataaataaacggtgtattagcttggtaagaaataatattgttaagatagtcaacattattactcatgttgagttcaatgattagaccatatgggttgtaagaaagcattgcttcaattgcaccatcaaatgttgtgtcaagacggatgcctgctgcaccaatatcagcaaaaaatttcaggtcatcatagctgacacctagttgtttgaagattgcaggattaacatctaaaaaagtttgaaatcccaatttattgccatattcaatgatttttttatacttagctttggtttcttcagggctgccttgtacttcaagcatactcatgaagatacgagaaaagccatatttgtgagctaagtccagatagtgagcgttgccttcaaatttgctgtggcctggataaattgacagacctaaagatctcattgtcataatagtacctcatttttgataattgtctataccaattatatgatattttttattgtaggtctagtccaaagtgaccgagatagtttatattttggtagggtgtctcgctacgtttttaattaaacaggtgttatatttaaagtacagggtatgtgttaagaaggagaaattaagatggataattttgatcaagaatctggtcaacagcaatatgctaatgattcaggattaaatgttttttagcaaaatatatggttatatggccttagcggttttcgtttcagcaattagtgcttatttgacaatgacggtttttgcgggacctatctctgcctttattgcacaacaccaattgtttacggcgttacctttgcttttattgcaggtgcatatagtggacaaaatattgcttcagcatttgtagcttcggcaaccgtctttgtaacaatggcgattttaggaacaattaccaaaaaagatttgagtcgaatagggtcttatgcttctgctgcgttaattgggttgattgtagccatgttagctaatttgtttttacataatccaatcattgactacgttttttcgattattgctgtgattatatttactattttaactgcgtgggatgcacaaagaatgaaagatatttatttacaatatggtgatgatctttcaactaatgggcttgcagttttaggtgctttgcaattatatcttgattttgttaacttgtttttacaatttttggatatttttggtgcaaatgaagataagtaattaaactagtgagactgtaaaatagtttgtgtaaggatgaatgattccttaaatttatttctttaaacattagaaaaaggagttcctttctcgtatgattggtttgaacaaaaaaacacatacagaaagaagaactccttcatgaatgattttaccaaagattttgctcaagctctattcaatccagacaaaataaatgatttattgcgcaaagagctacaacaggctgttaataacttgttagaagctgaattgactacctttctgggctatgatccctatgccagaaatggctggaatactggcaattctagaaatggtgcttatttccgcaaggttgatacccagtttgggccaattgaagtgcaagtgcctcgagaccgcaatggacagtttcatcagcacacgctgcctgactacaagcggcactcggatatcttggaaagcatgattatcaagctatattccaaaggcgtaaccaccagagaaatagccgacttgagtgaaaagatgtatggcagtcattatagtccagcccaagtatcaaatatttccaagcagatgttccccaaggttgaggcttatcacaagcgcaagctaagcgacaagtttttctgtgtctatttggatgcgacataccttcctttgcgccgagaaacgtttgagcgtgaagcagtctatattgccattggcattaaacctaatggacataaagaagtcattgactactgcattgcgcttagtgagaacattgaagtctggacagagatgcttcaaaacatgaggttcagaggcttgaagcaagttgagctctttctttctgatggtgttgttggcatgaaaacagccttggccaggacttatcctaaagctcattttcaacgctgcttggttcatgtcatgcgcaatatctgtgctaaagtacgcgtcgacgatcgtgaaaagatcatgaacgaattcaaacaggtgcatcaacagacaaacaaagaagaagccacagctgtcctgcatgacttctataccaaatggggcaaggtttacagccatgttatcagaagcttgaaagacatagaaccagatctgctggtcttttataactatcccaagcagatcagagcttcaatttattcgactaacatgattgaatcatttaacaatgtgatcaagcgcaaagctaagcctaaggcagagtttccaactgaacagtcgcttgatgcttttattggcattcaggcaatgagctacaatgaccgttatttcaatcgaattcataaaggctttggtcaggttcaggacaccttagaatcctactttgattaaataaataattaaaaaatcaatttacgagaaagaactatttacacaaaagatttgacagtttcaaactagtttctaataaacgtaggaacacttcatatataaacgtatactatataaatatagtgacatattaagggagtgtttttatgaaaagatgcaagaattgggttgtgactattgttgcatttctgatgttagtgggagaaatcagtgttctgcctgcaaatttgcaggggtcgacatcagttgttaatgcagctattcatcacagaaggagaaagcatcaatatcgtgataaaactaagatttataccagtaattacagaattgttgataataaacgatcaaaaatctttcacgtaatgcgcggtcataattatcgaatgaatcgtgaaaatgcagttttcttcaagagtaaagcagcagcacgtgcagcaggatatcgtgaatcaaaaagataaattaaaagacttctaagagttcaaagttcctagaagtcttttaatttataaaatttatggtaataatatacctgtttttcatcacaggttggtaaattaagtcgattattatggcagcaataatcgctacaattacagtaattgctaagttttgaatggaaatctggaccattgcccaaccacaaagagctaagataaaggtcaatagaacatctgcaatttgaacactaccaaccaacttggatgggtaatcttgccaaaagtacttacgagttctagtaatcaaaacaatcaacattgcgctaagaactaggtatacgtaaaccatagtagaaacagcaccgtgactccaaccgtgtgtgtttaagaaccaaacaaacccaataccaattaaagtccaaccagcagctagtgaaaaggcgatcttagcaagcttagccatattccagttttctggcttataagtaatgtgagtcctgtcagttccaatcatcatcgtaaccatattgttcataatggtatagataaccattgcattcaaggccattgggatgtagtcaaagaaaagatagccaaaagttaacagcatcgttaattcagcagttctagcaagcttggttagtgaccaagtagtcattctttggtatacgcgatgtccagcgtctaaaattttaacaattgagcctagaccatcgtctagtaataccattttacccgaacgcttagctacgtcagcagcatttgaaactgcgattcctacttcagcttgttttaatgcaggcgcgtcgttaactccgtcacctgtcatccctacgatatagcctttttcttggaaaagctttaccatcttgagtttatcttctggtaaaacatcagcaataccggccaaatcattaatatcagtattttcattgaaatcgtgaatcgaaattactttaccagttaaatcaacttgttctgccactgcagcagcggtcttttgattgtcaccagttaacataattgggcgaacgccacgtttcttgagttcagccaaagctgctttagagtctgttctaactttatcttgtaagatgaagacaccagctaacttatcgtcaatcaagactgccactgagcgtcctgccttgaaattaattccagaaatttcttcatcggcatgtttatcgatcaaagataattgcttaaatgaaccaagctttacattatgtccagcaacatcagccatagaataaccagtgtcagaagtaaatggagtaaagttttcagcattcatgactggaatgttattttctactaagtattcatcgattgctgtatcgataataccagcattacgtttatcagttgcggctccagctaaagcaagcacgtctttgtcaggcaagtcacttagatcagtccaagcggctacggcagttttgttttccgtaattgttccagtcttatcaagtaaaagcaagttcaagttagctgcgtcctgaattccagttaggtcagaagtcaggactccttctttacttaagcgggttgcttcaaatgagttggataaagcaaaagttgatggcattgctacaggaattgaagcaataaacatcattgccaggaatggcaacatattaataaaggtattgaaattaccgcctttgaagaaggaggcgataataataactaaggttaaaacaccatctagtaagcaaaggtagtagataatcttagtcaaaagttgttgtaagtgaccaggagcagcggaattgttgatcaaattaatcgtcttaccgcttctagaatctttacctgtagcagtaacaacagctaggccatcaccttcaacaactgtagtaccggcaaaggcggtgtcatcaattgctttcttaactggtttagattcacctgtaattgagctttcatcacaagctaagttaccgtcaacaattttaacatctgctgcgagtacgtccccgcgtttaagtgagattaaatcgcctttaactagttgtttagaatcaagtttgatccacttgccatcgcgttcaactgatacagtaggagtcaacttgtgtgaaatattatttaaaactcgtcttgattgctttttcttagatgcaccgttaaatgcagcaaataaaagcatcaacaacacgaataatgattggacccatttgcccaagatacattctagaattaaagcagcttctagaatccaagcggataggttccataacttagacaagaactctttaaagaaattgtattcaggctctggtacttcatttaagccatcttcttttaagcgcttgtctgcttcggcttgagttaagccgtgaaatttatcagacattattttccctccaaatctaccttaataaggtagcacagatattgctatgaataaaatactaaaatacaatataagatattaaatattttaatatcactatcaattgaaataaaaaaaggataaataatatgaatctaaaacagttacgttattttctagttgtagcagaagaaaagcagattacagcagctgctaagcgcttgtatattgcacagccaccattaagctatcaattaaaacaattagagaaagagttgggcgcgcaattatttaaaagaacggcacatggtattgagctaactgatgtgggacaaatttttcaaagctatgccaatgaaattatttctctagctcaaaatgctgaaaaccaagtacataagactatttccggtgaattgggaacgattgcaattggaatggcatcttcctcaacgggcttgataccaatgaattcttttaatgaattacgaaaatattatccggaaatttcttttgatatttatgaagataatacttatggcatcctggataaattagaaaaaaagacaatcgatctaggcattgtacgaacgccttacaaccagacaggtttaaatactaagactttaacaactgaaaaaatgatggctattagtgtagacccagattttcagccaaaaaaagaattacgcattaaagatctagcagatcagccattgattatttatcgtcgctttgaggatatttttaatcaaacttttgcacatcatgggcttaaaccattttatgcggttaagtgtgatgattcacggacagcaattacttgggccaagagaaaaatgggagtagcgctagtaccagaatcaattgcgacaacttatgcccaagaaaatatgatcgcaattaaacatgctaattggataacacatttgcagctggtttggcgtaaagatcatcaagttacacctttaatgaaaaaaatcattgctgcaatatgataatactgtaacttttacctaattgatccataataaatgtaaacgggtacaataattaatagaaggtggttgaatgtcgagtccgattcatgtttattcagaaattggtaagttaaaaacggtgatgttacatcgaccgggaaaagaactagaaaatctagccccagatattttgcatcgaatgttgattgacgatattccttatctgaagattgcccaagaagaacatgatgcttttgcgcatgtattgaggcagcaggggatcaaagtattatatcttgaggatttattagcagaatctttaacagatgagaaagttcgtcgggcattcttagatcagttactggatgaatcaagtattaaaaaacaggatcctttgcatcaattattgctgaactatctccaagaattgctaactaaggaaatggtaaaaacggtgattgctggaattagaaaaagtgcgattcataattctaccccatctttagcagatttggctgaggacccagattaccctttttatcttgatccaatgccaaatgtatattttactcgagatcaacaggctgcaattggttcagggatgaccattaaccggatgactttcagagctagacgacgtgaatcattatttatggaaacaattttgaaaaatcatcctgatttcaagaacgcaactattccagtttggcgtgaccgttatcatcatggtcgccttgagggcggggatgaactagttctaaataaccatgtgttagctgtaggtatttcacaacgcacttctgcaactgcaattactgacttagctcataatttatttgatcattcaagttatgatacgattttagcgattaagattccgcacaatcatgctatgatgcaccttgatacagtttttacaatgattaattataatcaatttacggttcatccctttattttagataaagccggcaaaattgatatttatgttctacagcccgatgatcacaacggtgtaaaaatcacagaaaagaatgatttggtgcaggttttgaaagaaaacttacatttaagcgaattggatttaattccaactggtggtggtgatccaattgccgcaccacgtgaacaatggaatgacggctcaaataccttggcaattgcaccaggtgaagtcgttacttatgatcgtaattatgtatccaatgatttgctaagaaaacatggcatcatcgttcatgagattcggtctagtgaactctcacgtggtcgtggcggtcctagatgtatgtcgtgtccgttgattcgtgaagatttataagaggcaaaaaatgaaatatttacaaaatgtttttcaaggtagaagttttctcgattgtaaagactatactccagctgaaatttcatatttaattgattttgcattacatttaaaagaacttaaaaaagagcatatcccacatgaatatctgaaaggtaaaaatattgcactactttttgaaaaagcctcaactaggacgcgatctgcttttgtagtagcttgtaatgatttaggtgctcatccagaatatctaggcgcaagcgagatccacttaggtaaaaaagaaagcgtcaaggatacggctaaagtcctaggctcaatgtatgatggaattgaatatcgcggttttgctcaagaagatgtagaagagctggctaaatattctggcgttcctgtttggaagtgggtgatggccgcgataatgttgccgacagtcttttagtttgtggctcaatgttaggtgttaatgtacatattgttacacccaagcctttgtttacacatcctgatgtacaaaaaattgctcaaaattttgcccaagattcaggttcaaaaaatttgatcacagatgatattgctcaaggcgttaaaggagccaatgttgtttataccgatgtttgggtttcgatgggtgaaaatgattggtctgaacgaattaaattattaaagccatatacggtcacaatgaaaatgatgcaaatgactggtacaccagatgcccaattgatctttatgcattgtttgacagcttttcatgatcgaacaactcaggtgggagaagaaatctatgaaaaatatggcttaaatgagatggaagtaactgatgaggtctttaattcaaagtatgcttggcaatttacagaagctgaaaatcgattgcattcaattaaagcagtgatggcggctactttaggaaatttatttattccgattgcctgtggcggtggtggcatccttgttattgtgaaagatgggcatctcagaggtgttgccggcgtaattcataaagatttttccgctgctaaaatggcagaagatatcaacgctgatgaattagtaattctaacaacggtggatcatgcatttttgaattatggcaaagaaaatcaacaagcaattggtaaaataaaagttgaacagctcaaacaatatctagcagcaggttatttcgcagctgggagtatgaagcctaagatagaagctgcaattgaatttgtagaaaaaacaggtaatttagcaattatcacctctttgagcaatgccaacaaactagcagacggagtcggcacaatcatttataattaactgggtgataaaaatgaatatttttaatgaaggaaaaaagcaggatattgcccaagttttagcagctaaagataggcgagtagctgtacaacataagatttttaataagtatcctaatcaaactctagtcgacattaatatgaatatcccaggaccaatcaagaataatcgctatttaactaaaatgtttatgttgggtatcaatgagctggaaaatgcttggactaacctaggttatcattttaaattggtgacacagcttaatgatgatagtggctgtgaaaacttttatgtattatctttgtcaattgaaaaagtaaagcgctcaacaattgattttgagaatcagatatcattgggacgtctctttgatgcagacgtgttggtaaaaaataaacaagctgcaatttcacgcagagatttgggcaggcagccacgtaagtgctttttatgtgatcgccctgctaaagaatgtgctcgcagccggagacattcagtggaacagatgcaggcatttatctctcagctttatcaagaatacgttgcgtaaaataaaccgggattttatgattccggtttatttttatgaaaaatctagttaaaaatttaaaaaatgaactaaaatagtaatgaataaatttatagatgtacgtataggaataagcatggaattaaagaaaaataagaataatttaaagcaaattacggcattaattcaatatgcatttttgaaaaataatgatttgactaaagacgaaaattttatgagtcgttatgatcatagtacaggttatggctattttgataaggaaaaattagctagctatattatggttaatcgatttaaaagtgatgtttttgggcatcatttaccgatggctggaataggttatgtagcttcatatcctgagtatcgtggccaaggtcatatttcccaattaatgaaagaaattttgcatgacttacataggcaagatattccgtttgctaacctggcaccattttcggagagcttttatcgccagtacgggtttagcaatagtatttatcaaaaagaatatcgctttgatggaagcgcattgcgtagttttaaattaccacgttctggtcatatagtgcgtggcaagtgggacaatttagctgttcaaaatggtgtgattcaactttatgaacgtcaactgcatactgatgatgaacgtaacacggttgtacgtgaggcatggtggtggaatagacttgattcttattatcatcaccgcaatgtagccgtttattttgacgcggatgagcggccaattagttacttgatttatcgcattagagacaatacttttttagctgatgaaatgtacgcaattacgccgcagggattactgagtatgtttggttttatgggttcgcacgcgggcagtgttaagcaatttaaaatgagcgtaccagagaaatcgttacgagctgaactttttcctgaacaaaacgaactccaagttgatttgcgtccttatatgatgagtcgaattattgattttgaaaaagttttggcttgtatgcggccaatgcaagaaggtgattttaatctggaagtcaatagcgatgaacagtgtccttggaatattggagtttggcaattaagtaatcatggacgtaaggtagcggtagaacgtaaggaagatgcattggttgatttttcgggatcaattaccgcgtggacccaggtgctattaggtagactaaccatgaatgctgctgttaaactaggattaattacagattaccgcatcaaaaaattagatttcgttaaaggcgatgtatcattttatgattatttttagttgtgaggttaaaaaatgagtaaagaaaagaaactcaatttaataaaattatttggcattgtagttagtggtttgaatttgatctttttttgccttgatggcacttaataagcatgaagatactaaggataaaagaagagtagcagaagaaggacacgcaccgctggatgaaaaataaaatgacggaattaaagattgcatattttgaccaattaggtcgtaaggaattagatcaggcagtgcagcattttgtgttaaaacatcctaatgtagatgtaaaactacttgcgactagtcatgatggtgcttttgcaaaactgaatgaagatgaagcagacatagcaatcaatgatttgcgtgacgagaatcttaactttgatgaaacagaattgactcaagctggtgtaatggcaattttgcccaagggaatgtatcctaatggcattcaaatgattgaaaaagacgagctcaatgatatgacttgttttattgtggctaaacctgaagaagaggttagtgagctacatttatttaaagatttgtatcaaattggcagtcaattcatcgcttctaactcggtcgaagaagcagcactgttggtcgcctctaggtctggctattttattttaaatgagaatacggctaggttaattaatactacagatttgcagccacttttcttgcttgatcatggtcagttaataaagcaaaagataatggctttttataagtcaaattcagcgttaagtagtgagtttataaagctattgcagcaagaatattaatctgtaaagttaaaaatatcttgtctaagtactataagatactgtaaaatatattatgaaagcggactcatatattttacattctggagatgatttttatgctaaaaagaactttgttacctttaacatcaatggtacttgttttaggattaactggtttggctagtcaagttgagactgttgatgcttcaacttatggtaatggtgtacaggttactattccaaaaaagatgcagggtacttggtactcttatgatcgtaatgcacataatggcacaaagatcacctttactgaacatactgttaatggcaaaccaatatttacccaggaggcttcgacaattagtgattacttcaatggtagaattgctaaccagaagaactttgataaggtaacgcaaaactggatgtctggtaaaactaccaaaatgaagaatgatacattctatgagattgatccgtggattacttttgaaaattggagtctttatcgagtggtaccacaaaccattaatggtaaaaagcataacgtgctggtttattctagtagatatgatggtggtaactacttcagaagcaagaaattagctaaaaaaatgaaggactacaagtttaagaaagttaattacacgttatagttttgtgacatcccttaactaagggatgttttttactaatagacgcgataaaatttagtataataatgacaaaattaattcttggaggagaagttatgaaattaaaacaaacaccaattttgcgtttatataaactagaaactaataaagaggatcatgcaaagttcgttaaggcagggcaacataatatgcttacttctcaagaaaacgaaccaggcacattgtttatgcagacaagtcatgacgaagaaactactaattttgtagtagaatgctatcaagacgaagcaagttatgatactcatgctaattcaaagcaatttaaggattttactgacgttgctaaagatattttaactagtcgagtaaaggtagaattgtttccggaatttatttctacaaaggcagaaaaactagcagttaccggatcaaatgattatgttatttatctgactgaaattggtgtttctttaggtaagggcgatgagtttgctcatgctgtaatgaaagaaatgaaaacggcagtcgaagaagaaaaagatattttggcaatgattgcaggaactgttgccgatcaaccaaatgaatggttagctattgaagtttatcgtaataatgaagcttacaagcagcacttggaaactaagaacttcaaagagtatttgaataatacaaaatattgtgttgaaagtaagagtttacgtaagttgcaaccagatgtaattgttgaccaaggtgcaattttctaccaaccataaagaataagacgaaaagaagaccaggctatgtggagtacataacctggtctttctagttagaggggaaaagatttattaacatatattattctggtttttagtggcgatgttttacctttgctactgctggtttattaattaatactgagctgatggccattaaaccaagcgttaaaaatgatccaccaattaagagtagtttaatcaaggttctcattcctttcatcttaattgatcttataatagcgaaataatattaagaatttatatgtaaaacctaatggattagttaagaaaataaaactagaaaaaaggctggttagcacgtaaaatagaaatagagtcaaagtctagtgcaactgcgcataaaataaagcagtatcgatgggatgctgcttgttttggttaaaaaatagagaatatgcttgtagcccttttcgtaaatagcgttaatgttgtaaaatggaaagtgcattaagtttattaatgagaaaattgatgtattattgcaaaataggccgtaatggccctttttgttgtgaaaaaattaaaagaatataggattggaaatgccaggaatagtagagcaaacattattagaacaacaaaatattgatttaaatgaaatggtaacaatgaatcaaatgattgatcaattgttgcctaatgcaagtaaagaattacaacaaaaactaaagattaaaatttataactttgtgcgtacacgtaaacaaccaagtattactgtgcgaagaagaaaatattttaagccggctgttgctaaattaattattggtaatgtacaagattacgcagatgcaattgaacgtcgtgctaaggaagccccagctaaagaggatgctactgataagaggccagcttctaaatctaagcgggttaagacaattactaagcgtaagattttagctaaagttataaagaatgataagattgataaatctattcaaaagaaattagaggataagattgcttcaattgtgaagaccaactttattaagccagttaacaagcggggaagtttttcggttgaagatggtgaaaaagttatagctgaacttagtcctttttatcaaaatatcaagattgatcaaaagtatcgcaagaatgctgaaaaagcggctgaaaataaggaaacagaaactaaagaaaagcctgagcaacattctaaggatcagaatgaaagtcgtgaaggtcaatctaaggactttgagcgtaagaataatcagaagaatagcaataatcgaaataataataatcaaacgcaaaatcaacgtaagcgacaaaataagcatccttttgagatcagaagagaaaataataaccgctcacgtaataatcagtctaaccgccgctataataatcgaaataattatgataatcggaataattatgaatttgatgaagctagcggtttgcgtgaacgctacaatacagtaatcagaaattacaatcaactggagcaaagatataatgctttgcaagataaatataatcaggctttagatgataaagctagattgatcgaagaaatgggtaagaagaacgaagacttacgtcgtgtattgatcgacgttttgcgaaaaatgtagtttttggtaaacaaagagactagtagtcaatttgaattgattactagtcttattttatgtttatgaaatatgatttagcttaaaaattaaaaaaatatgtgtaaaaaattatttttgtgtagtaagattaaaggatgataaatatttttattaatgattaatggaggagaagtatgagtttaaaagagctatttaaaagcaatgtgtttcgaggaaactgtcaaatcttttgtgtaaatagatttttctcgtagattgattttttaatcttttatttaatcaaagtaggattctaaggtatcctgaacctgaccgaagcctttgtggattcgattgaaatagcgttcgttgtagctcattgcttgaatgccaataaaagtatcaagcgactgttcatttggaaactctgctttaggtttagctttacgcttgataacgttgttaaaggattcgatcatattggtggagtaaattgaagccctgatctgcttaggatagctgtaaaagaccagcagatcaggctcaatctctttgagatctctgatgacatggttgtacgctctgttccacttgtcatagaaggcgtgcaagactttgatcgcagcttctttatttggctgttgatggatttgcttgaattcattcatgatcttttcacgatcgtcgacgcgtactttagcgcagatattgcgcatgacatgaaccaaacagcgttgaaaatgagctttaggataagtcctggccaaggctgttttcatgccaacaacaccatcagaaagaaaaagctcaacttgctttaagcctcgggatttcatgttttgaagcatatctgtccagacttcaatgttctcgctaggtgcaatgcagtagtcaatgacctccttgtgcccattaggcttgatgccaatggcaatatagactgcttcacgctcaaatgtttctcggcgcaaaggaaggtatgtcgcatccaaatagacgcagaaaaacttgtcgcttagcttgcgtttgtggtaagcctcaacctttggaatcatctgcttggaaatatttgatacctgagctggactgtaatggctgccatacatcttttcaattagatcggctatttccctggtggtcacgcccttggagtaaagcttgataatcatgctttccaagatatccgagtgctgcttgtagccaggcagcgtgtgctgatgaaattgaccgttgcgatcccgaggcacttgcacttcaattgggccaaattgcgtatcaactttgcggaaataagcaccatttctagagttgccagtattccagccatttctggcatagggatcatagcccagaaaggcagtcaattcagcttctaacaagttattaacagcctgttgtagctctttgcgcaataaatcatttattttgtctggattgaatagagcttgagcaaaatctttggtaaaatcattcatgaaggagttcttctttctgtatgtgtttttttgttcaaaccaatcatacgagaaaggaactcctttttctaatgtttaaagaaataaatttaaggaatcattcatccttacacaaactattttacagtctcgtttcgagcctgcattattatcttattgtatgttttatacgcattatttgggagttttagtgaatatttatttaaatatgctctgaattcaattactgctggtaattttaatacatatgtttattggcaaataatgcagtttgttttagcattattcacttcgttgcttttaccaattactaccgttgttttcactaggcagacgcaaaactatctgcataaaattcggcaagaaatcatgcatcattactattatgaaaaaagtgatgaaaaagtctctagtatgcagaaccgattaacagccaatttaaaaatcttatcagatgattatgctacaccttggattactatcttaagtggggttttagagattgtgattgctattgttttactagcaagcatgaactggattctaattttggttactgccattttagctgtgattacactttttgctcctaaaattatggagaagaaaacatcagctgccacagataaagtaaataaaaagaatgaaaagctgttaaatacaattgctcattggcttggtggattgcaggaactacgtcgttatagtgcatacagtcgtttggttaagcaaattcatcgatcaagtagtgattatgtggacgcaagtaagggtagtgcaaaattaagaagtgtaagttatttgattaatgcttttagcaattcaattgcacaaattggtatgagctttattgctggaatcatgtttttgcttaatatgatttcattcggtgattttgcagttgctagtggttttgcatttacgattttttcagcaatttggaatattactcagtcgttaacgcaagttaagtcaactaaggctttacgcgaacagattaccgatttaagaaagcaagttcctgatgaaaataaagataaagtatcagcctacggtcttaaagtttcaggcttgtctgtaaaatacgatcagggggaaacaattttttatcctgattttacaacctgaattgtcaaattaagtgcaacagttaggctatgaggaaatatattgcttgaagagttcttctgctgtgtgatattgaaggattcgacgatgtttgcggttaatggcatcagttgcctgttgaacataagcagctgacttatctttcatgcttttgcctttagggaagaattgacgcagaagtccattgcagttctcattggtgcctctttcccatggagaatatgggtgggcgaagtagatctggcagcctttgatcttggtcatatccgcaaactcagagccattgtcaaacgtgatcgatttaaaccaggcaggatgtctgtcaatctcattttgaagcagcctttggcatgtgcttgcccgatagtcaggaatcttgataactacttcaaagcgtgtggttctttcggtcaaagtcattaaagcaggctgattcttgcgtctgacgcctttaaccagatctccttcccagtgcagcggcgtttttctgtcttcaatctctttaggacgctgttcaatggaattgccaagatgcttcttgtgcaaagcatgaccgctatggccgtgatgacgcttgttcctgcgtcttttgagcttcataggcagatcaatattgcttatgtccagcaagccctgatcaatatagcgatagacagttggtgtgctgggacaagggtagcctggcatagtccttttgaattcaccaacgaattcatcgatgctggtggcatcaaatttagctttaaagcgtctggagagcattctcaaaaagacagcataatgcttcaatggattgcgctgatagcagtttttgcgacgcttctcataataaatctgtgcagtatcagcgtaatagtgctcatacaataaatagctgctgtctctttgcaggacacttccgcgtttgatttcgcgactgattgtcgacttatggcagccgacttcttgagcgataacagtacgggaagttatgccggaatccagcattgcttgaatttgtccacgttgtacgctggttaattgatgatagtgcttagaaatgctagaatttgaattggtcataaagatcttcctttcttgatttttcgtcacttcaagtttaggtcttcatggcctttttgtttaacacttagtgttgcacttcaattttaaatccgggtcctgattttacaataaaaaaagggcagaaagttttgcttactggcgattcaggaacaggaaaatcaaccttgtttaatgttttgttaggtaagctaaaacctgaatctggtacggtgacctatctagatgaaaatgaaactatcattcctgaaggaaaagctagaattggcaatatgccgcaaaatccagtagtttttcccgcaacgatcaaagagaacattacaatgtttaacgaaaatttgcaggataagcttcaagatgttgttcaagcagttcaactccaatccgacttagccaaaatgccagatggtgttaatacaacaattgatctaaaaagtgaaaatttgtctggtggacaacggcaaaaagttgttttagcgcgaacggaaatacacgagcaatcgtttgttttaatggatgaagtaactagtgcgatcgatcaaaaagctaccgaaaaaatcattgatgaattgctcaaaacagatcaaactattttgatgattgctcacaactttacgccagaattaaaagcaaaatttgatcaagaaattaaattaaaaagtaagaaaggggataaagtaagataaatttgaaagcttttattaaaaccaatccagttcgtttctggttaactgcaattggttggattattattcctgctttatcaattaccaatacttacgttgtacaagaagagacgaatatccttttaagtcgtaattggactaagtttattttaatcaatgttcttgcttttctgattatgttagttgactatggtgtgagtgctttagttgattatcagcagcaggctcaggtacaagacttaaatgatcaagttagagataaaattgttaagcgatattattatgacgggaaaaagcatactgttgcacagatgcatagactgtaaaatagtttgtgtaaggatgaatgattccttaaatttatttctttaaacattagaaaaaggagttcctttctcgtatgattggtttgaacaaaaaaacacatacagaaagaagaactccttcatgaatgattttaccaaagattttgctcaagctctattcaatccagacaaaataaatgatttattgcgcaaagaactacaacaggctgttaataacttgctagaagctgaattgactgcctttctgggctatgatccctatgccagaaatggctggaatactggcaactctagaaatggtgcttatttccgcaaagttgatacgcaatttggcccaattgaagtgcaagtgcctcgggatcgcaacggtcaatttcatcagcacacgctgcctgactacaagcagcactcggatatcttggaaagcatgattatcaagctttactccaatggcgtgaccaccagggaaatagccgatctaattgaaaagatgtatggcagccattacagtccagctcaggtatcaaatatttccaagcagatgattccaaaggttgaggcttaccacaaacgcaagctaagcgacaagtttttctgcgtctatttggatgcgacataccttcctttgcgccgagaaacgtttgagcgtgaagcagtctatattgccattggcattaaacctaatggacataaggaagtcattgactactgcattgctcctagtgagaacattgaagtctggacagagatgcttcaaaacatgaagtccagaggcttgaagcaagttgaactctttctttctgatggtgttgttggcatgaaaacagccttggccaggacttatcctaaagctcattttcaacgctgtttggttcatgtcatgcgcaatatctgcgctaaagtacgcgtcgacgatcgtgaaaagatcatgaacgaattcaaacaggtgcatcaacagacaaacaaagaagaagccacagctgtcctgcatgacttctataccaaatggggcaaggtttacagccatgttatcagaagcttgaaagacatagaaccagatctgctggtcttttataactatcccaagcagatcagagcttcaatttattcgactaacatgattgaatcatttaacaatgtgatcaagcgcaaagctaagcctaaggcagagtttccaactgaacagtcgcttgatgcttttattggtattcaggcaatgagctacaatgaccgttatttcaatcgaattcataaaggctttggtcaggttcaggacaccttagaatcctactttgattaaataaataattaaaaaatcaatttacgagaaagaactatttacacaaaagatttgacagtttcgtaatcgggactttctgtattgaaaaaatgaagagataatttgttattgatctcaatttttaaatcttttttgttaacggtaagcgtataacagtgtcgtttgcagataaaaccatttcttaataaaaaatctacgattggattttcatttgaatcaatcatgacttgcaatgcttggtgctctgcttgaactatttttgaaaatggaatatttacagagtaatcacttagattgaattttagataaatatatttgttatgaaaaagattgtgataagtagaaatagtgcctagatgcttatcgttatcagttactttgtagattttaggagatattttttcaatttttgtagtcattttttatccttttgataattgaaattaatttttgatcggttccgtttttaattatgaagttataaatcggttcataattgagcacagggaaaataagatcaggatcaattttaggtataatgtcaatcattgatttcttactaattacgttgagatttttaacttcttgagcatttcttatctttctttttgcttgtgaaggaggataaccttgtccccaaggctgttcaaaaagattttttatagtctgctcaaaattgatttcaccactccaaccccaattaagtcctagtggaaaggagacaacattgccgttattgatatgaccaaaaagaaaagcatcttgtggagtggggatataaccacattgaatattaggaaaagtatttcatgcaagcatcattccttgtccagaagtacatcctgtcacaatgaagtcagtcgccttgctattaattaataatgcgacagctagggaaacttgcacgtaagatagactagccgaactatcttgataaataccaaaattgaatacttgatcattggatcctacagattctttgatatacttctctaatatgaaatttttacttttttgcgatgtagcttgaataatacctattttcatatttttaacctctatagtttattttttgaaagcgctttataatattatataggaagtaaagtaagaaggtgaacgtgatgaaaaaaattattgttggaactcctgttaaattgagccatgttttaatcggtatgattgtggtagttttactttcactatttttgacaggatttggttatcaagcttggtggctattccttattgtactaattttaggtgtatttgtaactttacctacttgttttaatccgtattggcagattagtagcgaaaatattacaattataaattatgatattaacgatgtgataaaattgatgcaactgctagggttacataaaaagagtaagcaagttattaatttatctgatgtaaagaaagctgccgttgtctatcgtaaaaatgtacgtcttagtcctattgactttaatcctgattatttaaatttgattttggatttaggtaagggaacaaatatgactttgacacttggaaatgtcgactatcagcaactaaattcgattatgggtttgttacaagataagaatattgtagtagatgataaacaaaatattttgcaacttttaagagaaaataaaaacttgtttaaccattttcacaagaaaggctggacatcgctataaatggataaagagcaaataattagaaattattttcgagcatggctaagtcctaatcttgaagtagtccaaaatacatttgacgaaaatgctatttatagtgaatgctatggtccagtttacagaaataaaaaggagataatatcttggtttgaaaattggaataaacaaggaaaagtaattgcttggccaatagaaagactcataattaatggtgatacgagcattgccgaatggcattttaaatgtaattatcaaggaaaaattagtgaattcgatggtgtatcaattatagaatttaatgatcaaaataagataatttctgtaaaagaatatcaatcaaagtccaaacattattatccctatagtaaataagacttttaactgttaagaggttaaaagtcttattttgaatatgaaatcttttataaactaatttctgtggaaaaaattaccaagccagcttcgtttctttttagcctcttcttttcgtcgctgttcacgatcttctaacattgccttagctagcatatcaactgtttgagtcaattgtgcttggttatctctttgttgcttatctctaaatgaactactgttttgatacttattcattaacgtatcatcatcaagccatttatcaaagttttcaacatcaataataaaaccggtgctagtttgttgcgatgcaatgtgatattttctaggcaaatatttaaagtagcgatcaagcatagtagaaccgctgtttttcgccgtttgatcggagattttattgaaaagttctttattgatttgggcttttagccggtcatcttgtttaataaataagatatcgcttccgatttttgcttgattgattaacattccccaatcatttcgaccaacaaatagggagtaatcgtaattttcttcaaaatatttgctgacttggttatacatatcaaatttatcaagtgcagtttttaaaacatgcttgattggatataagaagtctctttcaatcttctgcgcatcttcaacactaacgttagtaaagaattttgctaattcaacttgacaatatttaaaaagatcatcatttgcacgactaaataagctagttaatgcagcattacgttgatcactttcacctgaaaaagtagattcaaagcttaaataccataaacgacgcataatttcaggctttagagaaaattgtgatttaatagagctttcttgtctattcatcgtgaaaatgaatgctggtgagggatgagttaaattacgattgttagtaacttccttgatgaatctttcaaagtaagtacgggttgtaagctcgggactgacatcatcaatcattaatggacttacaggaccatttgtatatacatagtcacttagcgtgttggtaattgtcatattgatattactcttgccaagggcataattctttggatccatcattccactatctaagaaattatgagcaccaattaatttagcggctagtcttttccctagggtggacttaccagttcgaccttgtccgattagtgctgtagcaataggcacgtcttctctagatacattgcttccagataattcatataaattgcggattttccaaagccatggtgattcatatagaaacagcataaagtcacaagcttgccagccttcaccaacttctttgtaagtattatattcatgagtgatatcacagaaaagttgaagcgcattttttaattgcccttcagttaaatcagaagtaataacttcagaagggatgttatcaccaattttagaggcttggaataattgaccattattgtaaaactgaacaggaacagggaagagatcttcttctttttcaatttgtgatgtatctgcttttgcctttttgtcttgacgaataatgtgctgagtcaagctatataaatcttgcccgattgtatctagcttacgtcttttattgccaccttcaccaaataaagtaactgtttgagaagcaacgagtttttcattttcagataatttctttaattcatcatctttgctgtagtggtcgcgatacttttttatctcttcagctgggagaataattatgtctttaccagttgaattaggactgtttttgatttcaagagaagaatcttgcattacatgaatgcgaagatcgtctttatttttgtcttctaaataaccagatagttttttagcattaatataagttgtagcctgattaaggttatcttgaaacatttgttgatagcaattgaataatggatcagaagtattgccgtaatcccaaactaattgttccatatttttattaacagccgtatcggtaagattcattgaacctgaaaaggcagagtacttgctttgattttccattaaataaagcttagtgtgaatcaaattctgtttggtgaaaaaaagctgtaaactaccatctaaaatacgtttagtgaagggactatcttggtgttcgtagctatattcaatcaaatcacgacgtttatttaaaatttggtcaattcttttgccaattgaatttgatccattatcggttagtccaagaattagtgtgatctggtcaaaacgtggtataagattttgctcaataaatttaatattagaaacaaaggaaacgcctttaaactcagagaatttatttgactctctttgaaaatcaactaattgccaaaaatcggcattggaaattagtttttgatcagtatgatttagtatttctaatcccatataaaatcctttcgtgagtatacaaacatttgcttttagtgtatcgtgaaaaattggattagagcaaggaaaagttaatttattattgaatttatgaattagattaagtaaaatctgattcaaataacggaagtaaaaatataataatatgttatcgctttggagaaaattatgacaacagtatattttgtaagacatgctcaacctgatttatcagttcatgatgatttaacacgtcctttgacagaaaaggggttgcaagatagaaaaaaagtaactgattactttagagataaacacatcgaccaagctttttctagtccattcaagcgtgcaattgatacaattcaaccagttatagacgagaagaaactaacattatcatctatttctgactttagagaaagaaaaattggtgatgagtggatttctaattttcatgaatattgtgaaagacagtgggaagattttgattataagctaagaaatggcgagtctttaaaagagacgcagaagagaaatgttgctgctttgaagctagttttgtccaaatatcaagatcaaactatgattattggtggacatggtacagcaattggatcagtaattaattactatgatccaagctttaaatatgaagcctttgctatgatccagccaaagaatccatttattgtgaaaatgaactttgatggagaaaaatatttggagtataaagtagttactttttagtaaaaagataatctcataaagtaaaaatggtaaatcaaggtactaataaccagatttaccatttttttatttgttatattatagcttatgttaaattttatcctgagcaatgaaattatcataaatggttttgataactacttcttcatcttgccgtctggtaccaatcataattgagatttgggatgcaccctggttaatcatttgaatggagatgttctttttaccaagagggtaaagcaagctagcacataaagtcagcttgtccttcatcccttcacctaccaccattgtgattgcataatcatcaatccactgcatttgatcaggatttagactagtttgaatttcattacagataacatcaattaattgatcagttaagacatcttttttgaaaataatggtaatatcatcaattccagatggcatatgttcatatgaaacatgatgtttttgcaaaatttccattaacttcaaggtgaaaccagcacctttatttaacatatattttcttaaataaagggccgcgaagtttttgcctccggcaatacctgtgattgtgtgtttaggtataaagccgtcctctggtacgatcattgtcccaggtttttctggagcattagtatttttaacattgacaggaatttcgccttgaatagcaggaattaaggcttcatcgtgaaagacggaaaatcccgcataagatagttcccgcatttcttgataagtcattcttttaattggcttgggctgatcaacgatatggggattggctgaaaaaatagcatcgacatcggtgaagttttcataaagatcagcgtttaaccccctagctagaatagcaccggtaatgtcagaaccaccgcgagagaaagtagcaatatgtcctgatggtgtaatgccatagaagccaggaaaaatgatcttttcatcttttgcagccttaattctttttaagttcacataagtttcaggattgacttcagcattattagaagtgccagtgacaattaaacctacatcttttggctctaaaaatcgtgctttaattccttgatgatttaaaattttagcaatcaaaattgcattaagacgttctccgtgtgctttaaaggttgccatgcggtagtcattattagggtaacttagcttcggcaatgtaagtagaagctggttaatatcctctaattctgcttcaggcagctcaaaatattgggcaattaattcataacgcttaaaaatacgggtagcgatgtcttgataattattactcctcaagctcatatatgcgtaagtgatcattagatcggttactttaatatcatcctcagttcttttgcccggtgctgagactacaacgacttgtctttcgggatcggcattaataatacttagggccttatctacgctattacctgaggctagggaagaacctccaaatttaacaactttcatatctatttttccttaactattatttcaaatctaaaattgaactgatttctttttccatatcatttggttcaataattttttcggtcttgggttcacgatcaaaaagggcacgcacaccgattgataattgaccgcctaattcatcatgcaattctttaattgcaccgacgccagtttgcatactaggaccaccagtgatggcttcatacaccgtttctgggaacttatatggactggctgttgaaacaatgaccattggggtttgatcgccggtcttcttttgatattgatttgctacaaaagagccaacagcagtatgtggatcaattacatagcggtcataattgtagacccgtttgatttctgatttaacctcttcttctgttgcaaaaccagctgcaaaatttttttgtaatttagtgaaaacttcaccgctaacttgataatgaccgcgttgagtcaattgattcattaaactagcgacttcatagttattttcgccataaaggtcaaataaaagtcgttccaaattgctggaaactaggatatccattgctggtgcattggttaaatggaacttacgtcgcttatcgtagacaccattattaaagaaatcagtcaatacattgttttcattagatgcacaaatcaactttttaataggcaaacctaatttcttagcataatatccagctaggatgtcaccaaagttacctgttggcacagcaaagttaacttcgtctcctagtttaatttcttgtctgcgtactaattgtccataggtgtagaggtagtaagaaatttgcggaaccagacgaccaatattcatcgaattagctgaagaaaattgatagccattagcattaagtcggtttttgaaagaatcattgttgaagatttttttaacttcagtttgagcatcgtcaaagttacctttgattgcaattgcacgcaaattgttgccgcgttggctgagcatttgcttaagttgaacaggactaacgccaccttcaggataaaagactatgacatcggtacccttttgattagcaaagccacgcattgatgccgtaccagtatcgccagaagtagcggttaaaataataatatctttatcaatcttttcaatttgaacagctctggtcattaattgtggcaacatttgcaaagctatatctttgaaggcaagggtaggaccgtgaaaaagctccatgtaaaaatggttatcgtgcttttcgattggaacaatgctgcgatcatcccattgttcactataagcgctttgaactgcagtggtgatttgctccttagtaaagtcatcaaagaataagctaataaccatggcagcgatttgcttgtaggaaagtttggataaatcttctaacttaaaattagcttgaggaaaggcaacaggcacgtaaagcccaccgtcttgagccacgccttgaataattgcttgaggtgcagttaaagtgttttcttttgaacctctagtactacgatattgcataaacaatcttcctatcttatgaaatattaatattataactattgtaccttgattagcacctatgatacaatcgtaaaaataagaaaatcattaaaaagaggataagatcaaatggccatcaaaattgcattgcttggattaggaacagttggttcgggtgttttaaaaataattaaaaataataaaaagaagattagacaaacaagtggtgaagaaatcatcattgaaaaagctctagtacgtaatccagaaaaacatcgtaatttagctaacgaagtgatgctaactacagatttcgattcgattttgcaagatcccgaaattaaaattatagttgaattaataggtgggcttcatcctgctaaggaatatattactgcagcaatcaatgctggaaaaaatgtagttacggccaataaagacttaatggcaacttttggttcagaattgattaatttagctgcaagtaaaaagtgtgatttaatgtatgatgctagcgttgcaggtgggatccctattttgcggaccttggctacctcttattccagtgacattatttccgaaattcaaggaattattaatggtacgacgaattatattttgtcacaaatgggggaaaagggactaagctacgaggaagcgctgaaaaatgctcaagagctgggctttgcggaggctgatcccactaacgatgttacaggtaaggatgcagcatacaagattgtaattttaagcaagtttgcttttggtactaagattagtattgatgattttactattcaagggattaataatctaaaggattttgacattaaacaggctcagaagttaggctatgtcattaagctgattgggattgccaaaaatattaatggtaaattatttgtagaagttgctccatgtttgttgccagaaaatgcgattatggcgcatattaaaaatgaactaaatgctttacaaattaagagccaaagcctaggaacagcagtattcacaggcccaggtgcgggtagctctgcaacggctaattcagtcatgagtgatgtgattactgaaataaaaaacgtagtgaaaaagaccaccggtcagccatttagtaatttctcccatgttatgcaattaacaagttcggaggatgtgaagtattcctattatttatctttcgaagcagaagagaccttgtttgatttgagtaaattactctctgatttggaaattccggttcgtgagattaaacaagtacaatcaagaattgtagttgtaaccgaaaatattagtcgacagcagctacaagatttagcgattcaagatcaatatttaaaagctagctataagattttgcagtaaaggaagggaaaaaatgattattaaagcaccagcttcaacggcaaacttgggtcctggctttgattcacttggcatggctgtttcactttatttggaagtagaagttttaagcttagccgatcgctttcaggtggatcatgtgatgaaaggaattccacatgatgaaaaaaatttaattgttaagactgcactaacagtttatccagggttaccaccgcttcatttacgcgttaaaagcaatatcccattggctcatggtttaggtagcagttcaagtgctatcgcagccggaattgaattggctaatcaaattggtaagctgggactatcagatgaagaaaaggttcaattaggagctaaaatcgagggacatcctgataatattgcaccgactattttgggcggcttggttgttggtgctgaagttaaccatcattttgatgcagttgaagcaccacttcctccatatgcgttggtggcttatgtacccgattataatttggaaactaagacagctagagcagttttgcctaaagaattagcttttggcgtagctacgcatggctcagcagttgctaatactttaattgctagtttgtttgctcaagactaccctaaagcaggagaattaatggaacaagatgtattccatgaagtttaccgagaaaaactagtgccagaacttgtaaaagtgcgggaggtagctcattcaaaacatgccttggcaacttatttgagcggcgcaggttcaacgattatgacgtggattgaagataaacatgtagctggatttttgtcgggcttacgtaaacatgatttaaaagatgagacattaatcttacatcctgatgaacacggtgttcaaattatccaataaaaagactgaccaagcggtcagttttttagtcgtcaaaggttgcagcaaaactatcaccatcgattagcattgacagcataccaataaggaataacttcagtgccattttcttgctctaattcacagtcggccatttttaaaatttggtctaaatttttagcactgatgttagggtagagcttcagtaaagcttcttgagtaatgccactttgtttaaagccactagtgggataattggcagaaaaaatatcagaaaaatcatctaagtcatatctaggcttaaattctccatcaaagtatttgatttcgatgttttcaatttccataaaggcaccaagttgttttgccatgtaagggaacttattagctagttgttcaacagtaaaaccattgtttgctttagttcgtgcattgggatgcagtttaagccaagcttcacgtatattatgactatcttttctttcaataagaaggtctttgactttttgaatagctgcattgtgtctgtttacggctttttgccagtctaatcgattaggatataactgtctatagcggacagacaagggatgatcgattgcgttgtagataaaattcagcttgtcagtggtataagaagttagttcatcgtcacgccacattaattcatagtaagaactcatgaaagacacctttctatttggatagactaattaatattaactgaatagtatcattttttgctccgattaacaaaagtgataaaaatgtctatttagattggtcagaagcaaaacttttgttaaaattaatgtgtttactattagtatttgctcaaaggatttgacaaactatggatcaacttgataagttcaaccgacgctacaattttctttcaaaattgtcagctgccttcttttattcaattgcggttgcagttgccttgaactttttttggacgccggggcatatgtactcgtcaggaatcacgggttttgcgcaattaattaatactgtaagtgaaagatatctaccgtttacattatcaacatcaatgatgtactttcttttgaactttcctttatttatattggcttggttcaagataggacataaatttactttcttcaccatcgttgctgttgttctaggttctatcatgatgcacgctattcaaccttggcagatgcacctggacccactggtttgtgcgatttttggtgcttcgatcaacggtattggaactgggatggcattaaagaacggtatttcaactggtggactcgacattattggtattgtaattaggcaaaaaacgggcattagttacggaaaatttaatatttttattaatttgattattatcgctgctgcgggatacatgtttggttggccacgtgctctttattccgccttgactatttttattaatgggcgagtaattgatgcggtttatacccaacaccagaagatgcaagtaatgattgttactcagcacccacagcatattatcgatggtattcaaaaccggatgcatagaggaattaccattttgcatgatgctgaaggtgcatacagtcatattgaaaagacagttttgattaccattattgatcgatatgatatgtatgatattcgccaaatcgtgcaaggagcagatccgtatgctttcatgagtgttagtgaagttgaaaaagtatatggtcgcttcaaggagcaagaaatcgtttaatggatagcccttaaaccttgatatataaggatttataaatgaaatttgaatcctaggggcacttggggagcaaaactattcaaaaagaagcagaaatgcttcttttttatttggagtggctttttgtaattatggctttattattggtctttgttaaaagtgattaaaaatgatattatttcgattgagggatgttgatatatcgtggatcatttagtgtattctccacgagtgtggaggtgatcctatcatcttgaagggcacgggagacaaggcagagtattctccacgtatgtggaggtgatcctactgttaacggtgatgactggtatccagttagcgtattctccacgagtgtggaggtgatcctactttgagctgtgtcaacgccacagccgtttagtattctccacacatgtggaggtgatccaagtcgttacatcagccaaaagatgaggcttaagtattctccacacatgtggaggctaaatagctgctctgaaaaatatgttctatagagtgactgtttttgtatattatttaaaaatattgttgatggtgcacggagattgcgttcacttatatagtgaaaagatgctaagaaatctaaaatagaatcgagatgaattggtaatctggtaatcgtaagaaggacttagctactaatcgttgtattcaattttgataacaaattaattaaagagcaaaaaatatgaagaattataaatttaataagtttatgtaaaaacagtgtcattaagttaggctattgattttggtgaaaaaacaattaaagcatcatttggctttagacggccagattgatgccctttttggcatatttttctaaatatcattcgcgttacacgtaaaagcgtgtgttgtatatagtgaaaggaggctaagagaatcggagctaagaggtgacaaatatgccgaaagcctataaaattaactcatactggcaaaaatactaaatggtcattaaagttctatcctaaaagagctttgttaactggtgttttgattgtgattgctatagcattatggaaagtgatttttaatggctaaatatacagaagtaaataaaaagtggaatgataaaaatgaggcccgtaagctttacattaataagaggtcaacgacgaaaaactttattttaaatcttgctatcgaagatgatttagaacagattgaaaaggatattgaagaaagacgcaataatttgtaaagaaataaaatgggatacatcaggtaataaaaagtgcatctcatttttatttgtatataatactagttaacttaaaaaagcaataaaattcaaataaaatggaggtatttcaaagaatgacagagaataataaacaagccaaaaccactgataccaaggcaaaacccaacaacgacacagcaatcttcgctggcggttgtttttggtgcatggaataccttttctaagagcttagcccatgtctatcaagggattgcacctttgaatctctttgtttttcggctgtaggcctaacaaaagcctgaattttatctaatttttgggcaagctcttttttagcttgtttagtaacgtgcaaataaatttctcttgtcactcttgaatcaccatggccaactctacgttgaattacataaagtggaactcccatatctgccaacatagaaacgtgagtatgtctaaagatatgagttactagattctttttgatgttttggcgtttcatgatacttttaagtactttattcaatttactattaatgaagtaaccatcacttttggaccattcattaacaaaaatatagtcattgctctttttgcctttacaatgattttttgcaattttaactgcggcagggggcaataatacatctctattaccggcatacgttttagcactattgcttttacggtgtcgtttatttttatctttttcatttctaatagttataagagagccttcgacacgagcgtagtaattgccatctttatcttcaatgatatttttcttttgtattgctgcagcttctccacatctcataccagttaaatacatccaggtgaaaaagtctttgagatcaggacgtttttgttcttcacaatcctttatgattttttgaaattcatttttttcaagatatttgttttcaatttcgttacgtcttttttttgcttcagatcgccatgttacttggacatcattaacaggatttttagaaatataaccgtatttctttcctagtttatagcaaacatctatgcatgacttatagcttgctattgtgtcattagaataatttttactgtaaagaagattatcaagatacttattaataaattgaggtgtgattttatttgctattaagtcatggccccaatcatcgttaatttttccaagtgtgcattgttttctgtaccacgtattataagacaattgctcgtgtgccatttcaagatatttagaacttagttcataaaaggtaatattagaattagttgattgcagttcttgtaactttttgcgaattttttcgtctagaattaattgtgcttgttttcgggtttgattattatttttgccaaaagtgcaattagcctcttgatattttccagttagaggatttttataaatctctctaaacttgtagttgccatttttcaatttacggatatacatactatttacctctattttctgttaaaatagagtacgtaaaaggcagtagtcttttacgtactacactactgttcaatttttgttcagttatagttcaattttttctaattcagcatgattgccagatcattgctgaatcgaccctcactcgttgccagacgggtgggggatttttggttttatcgattaactaacctttccatttgaaatcacctagtacagatgtgcgaccaagttcatttcctgcgtcatcttctacatataccataggtgcatcgccgctaatatcttcatctggataaggtgagtatttttgtacgagtttaacaccgatttcccatgcttcttttgcatttttacgtacttgaacatcatttccttcaagtgcatcatcgctcaatgtaatagttacatacgaattatcatcatctaatttagcagatgttataacattttgagtttgatctggtactttagttaaagcttttctaagctgtgacaagtgctctttctcatttcttaattgaacttttttaattgagcgcttttctgcttgcttagctttttgcttactggttagatgtgttttaggtcttgaatcaccactattattagaacgatgacatgcatgacatccaccaattacaactgcaataattactacaagaataattaagcctaggcacccgtccttagtatcattgctatcacttttcttttcagccatctttttctcctccgaaaactattcaggtttaacgtcgctgtggacgattagatcaagaattaaaaagcttttatatcttcatgttttaagtcgtattctaaattaggaaaaatatcaaactccatagatttaaccaaataatctttgtcttctggatatttctttaaataatttttaagttcagctaatatccaaacataagcataataagcaggctgactattatcaaaaagtcctaaagtgtagataaccattcctatgctacttcgatattttcctttattaaaagctctattagaaacattgattcgatctgaattatataaaattgggcttttacgtaaagcatgttttttggatctgttattgaagaccctgcctccatgagctgttagatttctgtatgataaatatagggcaaaaatgtcaccatataattgataaaactcacgtaataactgatcattttgactaaatattttttgggctccaattaatctaagaatagttttatgcctaattgtaggtttacttagacgataccaatatagaaattgaccaaaagtaagacccttaaccatgatccaaggtggaatattgttatgattagtagaataatggtgaaaaggctcattatcggttcgttttattttgtcgaattttctgagtaatctggaacgatcacatttgagattgcctctacgatctctcccgtatgttttacctgtattgaagtgactaactgcgcaatatgaactatcaatttcagaaatattttctgatactacataagctaatgattgcttaaaagtttgttcaaagtcttctagagccttgagtaaatccctactaatatccttatctaaagaatacaatgcataaatatgttcaaatgtggtaccggtcttaaatccaaggtcatcgttacctttttcgtttaagaaatgatctttgtaaccatttattatttcgtaatagccataccgtgataaagcattcttagctgtttcttcgtttaaaaatactagatttctactttttaatatttgaatttgctctttaattgttttaaatggtttatctgttctcatttttgactccataaaaaaggacaggcaacaaatgtacctgtccttccggctcaaaactgagcatttcattgattaagactatagtacatttattttctttattcgtcaacaaataacactaaatttagttagtttttttcaaaaactacaagttataactaactttaacaactttgcctaagatacgacccggattctctttgttgagaagaatggggtcgtattttttattttctggcattagcattacttggttgccaacatgcttgacgcgtttgagcgtggcttcttcgttgtcatcaactaagacggctgctatttcatcatcttcaacagtaggttggagatgaacgataactgtggcaccgttaggaatcttaggttccatggagtcaccttgacatttcaaagcaaacagcgtgccgtcttctggctcttcatcgaatagctctgtcgtgtagccatcgatgttctgttcagccaaaattggtgtgccacaagcaatcgtcccaatgatagggatgcgcactgggtgcatccctgtttgatcaataggtttcatgtttgtggctttttctaaactaggaaagaaatcattaattgaaacattgaatacgtcagccaatttaaaaagaacatcttgatttgttttacgagttcccgtttcataacgagtaacagttactctcgaagtaccaatcttattagcaagttgttccgatgtccaaccacgtttatttcgaaagtaccgaattctttcacctatatatttatttaaatccattattttgtcctttctaaaaatattataggtctttatgtacctaaatggaatatttttttatcttttaataaaaatatgttgcatatgtaccaaaaaggtattatattatttatgtacctagctggtacatatgcacaaaggaggcgacagaatgcaaataaagctctacgatattcgtaaaaacaaaaagcacttaacacaacaacaagttgcagaatatcttggaataagtaccaaatcctacagagataaggaacttagcagacatccttttactcaagacgagatgttcaaactttcttcttactttggaatgaaaatggaagatatttttttacctcgtaagtaccatattggtacaaaagaagtgaaagggaggcaatgaaatgacaattagagaagcatgccttaaagcaaaaaaagaaggccgtggcataactcgtaaaagttatggtcaacgaccacctctatttttgccaactaatacttcatcttgtgttttgttaattccttcgggggaagacagcttcaaaacaaaaagatggaaccccaatcttgatgatttgattgcaactgattggtatgtgtatggctagaaaatcaaagattttattttagacagttcatcaatgacttgttttaacccacggctaaatcgagtttgcatgaaagcaattgattcagtattaagcgtaataattgtaggaacattgttgctatattcattattaagccatttttgacgtgataattcattaactgcatctagcaaatcattaatattggtccagtcagcaaagtatatttgtttaattgaataaaaatcttgaaattctctagcgtctaaacgagattcaccgttctttattctttgacaatatgctttgtaaaaggtgagcaaaacagattttgcttcgattgttagtgattcataattcatatttatcacctcctctctgattaaattttatcagagaaaaggcaccctatttcccatttgagcaaaaagttgaaacatttgaaagaaggtgagaaacatgactgatgaagatttacttgaaaagatgaaaaagtatattggtcgcaagttggatcaggacagtgatcctcaagcgatgaaggctatcatttctgagtacatgcacatgagaggagatgattaccgttgatggccaatggttggaaaacacccaagcagatccaagaagactatcatctggcagataaaacttgggctacttggcgtaagaagtgtgaggcatccccttatagggatgcaattgtaagagtatcaacacggtcaacgtttatcattgaaccgcgttggcaaaagttcttgatctggcagtcaaagaactatgaagaaaaacatatggatccgcatttgcgtggtctgtaaaactaggagaaattgaactatgactagaaaagaaacagcaattgttgtgatgtacgtgactttaatcgctttagcggtcttaggactgtattgtgtccctgacgttcttgcaactgggatgtaggagggatgcacaatgacagaacagactttcaataatttgctacacaatagcaatgctttatttgaccgcaataatgatatttggccaaaagaatcaattttgaccaaattacaaaaaaacacgttgcctgaaatcaggtaacgtgtcaaacacataagataaattgataatccttaacaagtataccaccgtaagaggaaacatacatgccgaagattaaaaaagtttacaaaaccaagtatacagtaattgataacgccgtaattgaagatacaaaactatcgtggaaagccaaagggcttttcacttacttgtggagccgaccagataactggaatttctatgtttctgaagtagcaaagcatgctaaagggagcagagatcaagtaatgactggtcttgaagaattagaggctgctggttatttgctacgcagtcgcaagcgagacaagaatgggcgcttaacaagtgaaaatgaatggctattatctcaagagccaaatactgctttgattgctgaagctgcagaaaagaaggctaagaaaactggtaaggcaaaggctaaaaagcgaaaagcatttatcaaagttgtgtataactttaagctgcctaagtcggaaaatccaacgttggaaaaacctatgttggaaaatccaacactactaaatactaaccagactaaatacttactagataaaatacttagtttatctctctctaaacctctccctaaaatcagaactgtggataagttcccagctattgattatgagagagatgaaaaactaaacaaaatcatttttaagttcaatcaagctagagctaagtatcatagcccgatagttgcattctcaaaatcagagcgtgttcaactgtcaaaagctattggctctaagtcacttgaacaacttgaaaagcaactagagccgattattgacaacgtagcaatttttgctaaacagtatccagccggctactttatcagctcagttagaaatctaccggaggtaaacataaatgcataacgataaatccaaaaacatcagcaagaaagtgctggtttacttaccagccggaattgtaactactccagaatggttgtttagaacattcaccacgtcttcgcttgcaaatcatggaatcaggaaagtgactgaaggtcttaggacatacagacctagtggagaagtagaagctggcagcattgaattcgtagttcagattaatagcagtgatctggtcattagaattagtgctgatacgcctattgtttataagggatttaagaagtgggaggcacttgcatgaaaactaagagaatgattgatgaacagcgcattttaaatatcattacagcggctaagtttgttagctatgctccaatcgaccgtttgactaataatcaacatttatcaggtggggcaatgacagacaaaattagaatctctgcattgaattacttgattgataacattcgtgatgaagttggtttgggctttggagatgtaacagataacatactgtcaagctcattaaaaggcaaatcaggtcgttttgctacagaagcaatgattatgggctggaattttgccaaagttatgtcagcaatggaggataaaaatgactgaattaaaaagagcgactgttaagtgccatgggaaatttaaaactagtttgagtattaatagagacggcgtaagcattagctttactgctgaaagaaagacagttgatctaaatcgtttggctgcaatgcttaaagacggggcaacagccatttttgtaagtgatcaaacggagcttccggttgatgacgataaggataagccagttaagggacaaatgagtcttctagataacggcactaagtaggtgatctaatggctaaaagacatattaagctattcagatattacaaagaatggatcactgtttggaaaagccagaaaatacgcgatgtaacttatatcaaatatgagcaagttcagcgctggcttaaagaaaatgccccaaatctgtatttagacaaattaactaggacggatgtgcaaaagatcgttaacaaatacggtgaaacccatgagctagagacagttaaggacttcctacaccacattcaagctccattaagggatgcagcatatgaaggatgggttgcaagagatccgacttataaagttgtagcctcaagtcaagttaagcataaggccacacgccagatgtatctggaagttgatgaggttcaacgtctagaaaaggttttgaaaaagcactatcatccgatagctgatatgtgtgactttgatctaagaactggtttaaggtttgccgaggtgttgggattaacgccagcggatgtagattttgataaacacacggtttatgtgaataaaacttggaattataaagctggctgcgacagtgatttcatggaaacaaaaaataagtattcccatcgtgtaattacgattgattcacaagctgaagatgatttaagaagaaacatgtttggtgtatcaaagagcgaacctattttcgttaaaagatggactagttggaaaatgacacacaggacacgtccgccacgcaaacgatttaaaaagtatgtagcaattcataacgcaacaattgacagctatttatctagattgtgtaaagaagctaaagttccaagagtcacctttcataatcttaggcatacgcatgcatccctgctaatcgctaatggtgtttcaattcagtctgttgctaaaagacttgggcatgctgacactactactacgcaaaagacatatatccacttgctggatgaaatgagagagaaagataataagcagattgtgaagatcatggacgggctaggtgactagatgttatttgatgtaaaaacagtgaatgctttgctagacatcgatgagtcatataaagcacctgaaagaatgctgcagttaatgcttgacaacaataagagagttaaaacatttaaatcttttttgcaagtatccacgaaacttgattttgattggtttcatgaatactttgaggatgaacaagctgaaagaaagagtaaaaagcaagatttcactcctgcaggtattgctaaattgatgtctaggttagtaaatccgaatgcgggtatctattacgagccagcagcaggcacaggtggaattttaattacccgatggaatcaagatcgaattaatgatcctatagggcttcatggtaacaaaaagattcttgaaaaaaatcctggaatttctatgtttacctatgatccaagaaggtattggtatcaggtagaagagatgagtgatagagctattccatttttgctatttaatatggcaatccggggaatgaatggtgtagcagtacaatgcgattctctttcaagggatgcaaaagaagcatattttattagaaatgatactgataactggctaggattcagtgaaattattaaattgccacatactgaagaaattcagcaagagtttgatattagaaattgggtaaaggagtttaaataatgaaagttcatttcgatgatttattaacgcagttaaaccgtgctgaaaatgataataaatgtaaatattgccattggccttttaaacctgtgatgatgaaaaaacgagatggatatgttgaagcagtactaagtttacatgataatcaaggaacatattttggcttttatgaagaaagaccggatggcagatatagcaaaataggtcttgatactttcaaatgttgtcctatgtgtggaagaaggctagataaatgaccgcatcattaaaaacaaataactgctatctttgcagtacattgaatgcttttcacgatggaccagatttatatgcatccacaatgaacaaatttcacgttaatttaagtgaaatggatggtaaatggtacttaatgattaaaggcttaccttatcctattaagtattgccctaattgcgggcgaaagttggatgagaataccaagtatgaaatgacagattggctataagcaagattttattgaggtgaaaaatggcaagtaataatttaagtgatcttaatgacatgctgtttaatcagctggttcgattagacaaggatgatatcaaagatgatgaactgaaaaaagaaattgatcgtagcaaagctatgaatggaattgcacatacgattgtcgataatgcccgtgttgttcttgatgcaaataaattcatggatactagagaagacacaaatttaaagctcccgaggatgatcggcgtaaaggaagataaggaacatgactagaaaagcttggaacaaaggactgcatgttgacctgagtagtggtaaagggcagtttaaaaaaggtcatattccttggaataagggattgcataaagatttgagtcatggaaaaggtcaatttagaaaaggcaatcgtccacctcaatatcgtccagttggttcaatccgacatcaaaaagatggatatacatatattaaagttgctgatcctagtgaatggatgccgtttcatcgatatctctacgaaaaagcacatcattgtcacttaaaacataaccagttaataatttttttagatggtgacagatcaaattttgatttaagtaatttgatggtagtcactagaaaagaagcggcaattattaaccatgaaaggctgcaaattaaaggcaaccaagagctatcaaagactggtgttttggttgcaaagctgaagcagaaaattaaggaaaaaagtaatggaaattaatcagattggtgttatcacgtttaaaaatggcaagattgattctaagtcctcatttgaaattaatagaatcctacatagttcagacaaaaggagtatgaatagaatgaaaattgaattgaaagtcggcacgagagcaacgactaaagatttcagaaatacttacaaggctaggtatctagtagaacatggttggaggatcgattcagtagtaaagcctatggttgctggattgactaatcgtgtagatttgatctcagtaccaactaagtatggacagctagtagtaaagaatgaggatatgctaacttatgttggcaataatgtatgggatgtaaggagcagcaagtaatgagtaagtacagaaataacgcttcagccttaactaaagggtatgaagaaatcgacactaatccagatcattacaaaagttcatcttttaaaactgaaaatgattatgttgaaggtgtagcaatctacaccatggatgggtcagttttcaagtttaaagatttaactgttgatgatgtttttgatgcaatcaatgttaataaagatagatggctaaacatcaacaatggtggtcaagtaaatcttggctatgtaatctgttatcagccttggaaattttataagcatgatagccataagagaaagtattgaggcgatagcatgaaggaagaacatagaactaaggcagtcaagattgatattgacgatattagtcaaaaaagctggtcttatgggatgcaaaaaattgctaagcaaattattgcacaagcctatggtgtcacacctgatgcaattgtcatcacatctgcagatttaaaaagattggtgtttcaaggttacaatgcgatggattggaataagaagtttgcactgcaactgaagatcacaccacgtttaaaggagaaaatttatggtagcaaccaagaaaacaacgactagaaagacaactactactaagagtgaaaaagaagagatgaagccacaatctttttttaagtatgcataccctaattcttcatatgttgagttgttatttacgcctttcaatgcaaatgatcttacaaatgagttgaaaaataattggaataaagatggtattttttcaactttaataggtattgataagaaaaatgaaacagtaaattacggtgaagatatttctaaaattcaatattgggtaccatttgcagtgccagctaaatatgtacgattgattagaggttatcgagttgaataagtatagacagcttgaacgtcagcaatggcaagaagtaatgcacttagtgcacatatgtgaagctaagtatggatctatttctgagacaccagagaaagaccaaatgtttgtaaagatcaaaaaactttgtgccaacaataaagctgctggcttatcaattgatcaacaggaaaagatagttgaagcaattgaagctggatatactagaacatatattgccaggcgattccatgttacgggttcaacggtaaaaaaagttagaattgcatatgacttgaaacctaaaccagtatggaaatatattctgtttaaagatggaaagccaatttactttattaaatcaaagcgtagagatttaactgctatctttaaacgtaatttttacaataaaaaagttacagagtcatttttactgaacaatgggtataagttaaaagtatgtaatacaatttggcaaaatattccgattggcgcatattatgtcacaccggatcataagaagtgcatacagaaaattgatgataaatatagggaataagtgagagggatgcattgtggagttagatattgatgttgaaaaaacactagataagacgcgcgactttttagaaaaagatctcagaaaattagctagtttagctgatcgtgacgttacatctttatctagtcctcaattgccttttagtgtcagtcatggtagtgcgaagaagtcagatgatattctaattgatcactggtctgctgatactgccttgattgctgttcatgctgctgctcatcacattcctgatcttgatcacgaaagagaaatatttattctctgctactttaagtattattctgataaggatttggttaatagatttactatttcaagatctagtttacgtcgacgaaagaatcatgcactgctagagtttgcaagaagattagatgtgcagaagagtaatcctaatcataattgtgattggctagaaagcttgatagtaaagtaatctgataaataaaatgaatcatttttgaaccctagatgaaccctaggtgaatcatttgtgaatcaaagttgaatcatttgtgaaccctcggtgaaccctactccgttgtaatatgatagtgtcgaatgattagggaaggatcattcgatacggtatgtttttgtttaacaatcttatggatgtgaaagacctccttaaatagggatgcatatgtatcaatttgatatgtgtgcatcttatgctcagagcttagtctaactggtaaggcgtcaacattgcccgttgagaatgcaggttcgaatcctgtagctctgtttgctacccaattgttgtagtctcgttcaattgataatgggtagctcatatgaacttagtacaaaggtagtatgctggattccaaatccagagatgtgggttcgatccctacagttcgtgttggtcacgtgttaaacgaccggcaagcaatcacgtttgtgattgcttatttattttgcaaaagaaaagaggtagaggcatgcagctcaagaaatgtagatatccaacatgtaatcagttaatcccatttgatcaaaagaatccgttctgcaaaaagcacggaaagaattggcatcagcgccaatttaattatcaaaaaacaaattacaaaaactacaacaaatatcagcgcgatccggttgcgaatgccttctatcattcggcaccttggcgccgtttatcagctgatctaagacgccaatctatgtggacctgtgaatgctgcggtcatacttatgacgcaaaatcatttttggttgttgaccacattatcccgttcaaagttgagccgagattaaaattagaccgtaaaaatctgtgggttctatgcaaaaagtgtcacttttggaaaacaaagctagaacagcaaatttatggtacatccctgatcgccaatttagacacgagcaaagcttggccacgcaaaaaaattcaaaattggattttaacgcgtgagaaaagcaaataggccccccgtgggtcaaatcgattgagagcacgcgccaagccgtctttttcttttgagcgaacagtaattaaactctgataaaggtggtttagattatgggacaaataattggagtcagttttttacttttaggcctttttgcattgattcaggaaggaaaagaataatgctacatcgtaaaaataaaaaaatattattaattataactttgatagttttaattttcggattatcggcatgttcaagcgattctgcaaacgataattcggatggagaagatcatgggataactttaatacctatttttcattcagatggcagtactgacatgttatttttaccgcattaattcaggagagaaagcagtgaaatattttaaatttggtcagcaaataggaggtgattaggtggcaaatattaaacatgcaggtcgtaaacgcaaacttaatgtcggggatggcgaccgtccttatcaaaaacgccaatctaagaaatttaaagaaatgaataaggatcttaaagaagttcaacctacgccccctagtcatttagataaacatgggaaatggttgtggcgccagattgtacctgaattacagaaaattggtaatattaaatatcttgatcagttgaatttagctgctctttgttcagcgtattcagattttcgaactgctgaagaagaaattgctaaggatggtccatatccgttggcttatattgaagttccgcaagtaatgacttacaaaaatgcaaaaggtaaagaagttcaaaaaattgttaaagttactaagcaggttcaagacaaaactaagccgaatccaatgttctctgttaaaaatactgcagagcgaacaatgaaaactttatgtgctgatttaggtatgagttttaatgcgagagctgcagcaaatattgagagtgaaaattatcatgctcaaaataaacatgctgaaacaagttccagatctcctttaggtttggtgaagttcaatggagtatgatttaacagaaattaaaaatattaaaaagtatgtgcgagagagcgattttaaggtcaagttcactaatattgctaatcaagtaaccgattatggtactaaatttgctgctgatgtattgctaacagatgaatacattactggtagggatgtacaattagcagcatttcgtcacatgaatgatctttctttacaaggaacggatgattttccattcacttattctgaagaatacgttaatgcaattgaatatttcacaagaatacttccaaatccacttgatttaagtcagaaaattaagccatatgggtttgaaagttttttgtttgattcaacacttggttggcgtgatcttgaaactggcggatcaagatttcatgtagttcatttttctacttcaagaaaacaggctaagactttttgcgccgctgttttactaaattttggctattttgtaatgggacttcaaggatctgcacaagatttcttagttgcatctgtagattcagaacatgttaacaagttatttgattatatttcattgcaagcgcgtcaaattattgagttacctgattttcatgatgaatgtaaggctcaagacgttgaagttcagtcaacgcaaattatcggtcataaaaatcgaaatattgtgcgtaaaggtactgcttcaggtcgaaattcttttgattcgaaacacgatttgtttgctatttttgatgaaattggtggattagatccaaaatatgatcaaaaaatatcagatatcatgatgggtcaaggtgataatcctaatagattattggtaaaaatctcaactgcttatcctaatccaaattgtgcttttaaacatgaagaagatagcttacgtaaggcaattgagacggattctcacgatgctgatgacacatttttccttaattttgctcaagataatgaaaatgaagtctttaagcctgaattatgggagaaatcgaatcctttgctacatgataaagactcccatgatcaacgactaacaggattaattgatttaagaaataaccttgaaagacaaggaaaattaagtgattttgctaataaatcaatgaatatgtggtcacgtcagtttcaagattcatatttgccactaagagacattcagaaaaatatagtttctgattttaatattcatggcagggatgtatttattgggattgacgcttcaatgtctaatgacaataccgcttttggtatgattttcccttatgatgatcataaatttcatattgagcagtattcttttatcccatttgcgcaggctaaaacaattgaagctaaagagaaacaagatagcttgagttatcgtgaattagctcgtcagggcttttgtgagatcactaataatgtctcaggtacgattagctatgagcaagtttggaactggctagaacgctatatttcatcaaatgagctaaatttaaaagctattgtcgttgatccagcttacttaacttggtttgctaatcgtgttgaaaattatcagcccgattggccgtatattccatttaagcaaacatctttacaattgaaccaacccactaagggcttacagaaagcgttcattgatggaaatgtgtctttacttaaagatcctttgttaattgatggcttaaataatgctgtattggttgctgataaaggtggcatggttaaaattgaccggcagaaccgagttagtcagcacattgataccgcagatgcaattattaatgcgtactctcaagcacagaattactttgaagattttaacgatagtaaagatgttaagttgcttgatacgatgacacaggaacaacgaaataattactttagaaatctttttggagcgtaatatgatcaataaattttggaaatttctcaaaaaagtttattttctctatattcaggcaattctttttgttgcaggctttgtgcttttaaatgttgcttgctatcagcttaatgtgactgctggcttatttatttcaggatttacattgattttattcgctttgattatgaattctgatcaagaaaagaggtgattagatggggcttttgagtagagcgtcaccacatagaattaaaaatatgacgacttcagtgccatcaactcacggtttagtttttactcagttgataggtaacgagccattaaatctagtaagtacgagtaaagcacttctaaatagcgatatttttagtgtaatcaatcgaatttcatcggatattgcttcagcaaggttcaagacagctgatcaatatgtttttaatctactaaatacacctaaccggctaattagccggttttctttttggcaaagtgtgattattcaactcttattggatggtaattcctatgtgccaattaaaggtatgagccttgaacaaagacgtccttcagagatcagtgagatcaatgttttggacgattatcaagggctaacgtataaagtcacaccatttgacggtgaagaagagtttactctaactcaagatcaaatgttgcattttagaattatgcctgattcaaggtatcagtatatgattggcatgtcaccattggaatctttagcctatgaaatgaccatcagtgctgatagtcgaaaagcaactctgaattctattaaaaatcagattagtccaatcggcattttaaccgtgccagcaagtcagcttaatgatgaagatcgtgaagttgccaggaaaagctttgaaaaggctaatagtggtgaaaacaatgggcgattaatggtattgactgatgattcaaaattcagtcagttagacgtaaaagctgatgtttttaaagcattgaatgaaaatgctaatttttcagcatcacaaatatctaaagcatttggtattccagttgatatgctgggtggtggtcaatcaactgaatctcagcatagcaatatcgattctgttaagggtaattatatttcagatcttaattcttatatcaatccaattttggatgaattgagactgaaatttaactgtcctgatttaaagctagatgttaaatcagctctggatgttgacgactcattaacaattaatcaggtcaattccatgcttcaggctggtgtgattaatcaagagcaagcacaacagcttttaaagagatctggagcattgccattagatttaattccatttacttcaaatgaaggaggtgagaatgatgatcaaaattgatgttaaaggtgatgtggtggataacgatactggtcaattctttgattactgggggatgcagtatgtttcaccgcaagtggtaaaagaatcattggataaagctcaaggtgatgaggttgagttagatatcgcttcatatggtggtgatgtctttgctgcttctgagatttatacaatgattaatcagtactcaggtaatgtcactggagtaattcaagggatggctgcttctgcggcaaccattattgcagaggcctgtgaccacttaatcatcagtccagctggtcagatgatgattcataaagcatctactgccggagttggtaattcagatgattttactcatactgctggtgtgttgaatactactgatcgaactattgcaagcatttatcagagtaaaacaggcaagtcggaagatgaaattcttaatttaatgaagcaagaaacttatctgacagcccaagatgctgttaaacagggctttgccgatgaaattatgaagattaatgacaaggtaccacaagtggtaaatggacttcacgagattccgtcaaaagatgcagttaaaaaatttaagaatttaattcaaagtcaaaagggcatcgattcaaactctaaacagtttgaaaacgatgccctttttaatgaaaaattagcaatgctaaaaggagaaaataatgggaacactaactaaagagcaaattcaaacagcatacatgcaagcgtctaatcggtatgctgatttgaataataaagcgactgtggggctagttgatcacagcttgactaaagatcaatacaatcaaattattcaggacagagatcaagccaagatggaaagagatggtttgcttgaccagcttaagaactgggatgctgaccattctgattcacctagcaagccaactaagtccacaaatttaaaaaacactcataaaacaaaagaagaaattgctgcagaagcaagaaagcagattaataatttcgtccacgccggaaagttcttgaatgctggtgacactggtgatgctggcactacaggtgtgactagaccgacggtttcaccaactattccggaacaaattatttataatcctaattctgaggttaactctgtagttgatttatcaacactgattactaaaactccagttgtaaatggtagtggtacttatccagtactaaagcgtgctgatgactcatttaagtctgtagctgaactacaaaagaatccaacaatggcactacctgacttttccaacgtaagttggaaagttgacacttatcgtggagcaattcctatttcacaagaagctattgatgattctgcggttgatgtgtcagatattgttactcgtcaaattggtgaacgtaaagtaaatacttacaatgccgcaatttcaaagaagttacaagaattctctgcagcaaaagctaataaagataatcttgttgatgcatttaagtggctgatcaatgttgggcttgatccagcatataatccgatgctagttgttactcaaagtctttataatgcgcttgatactttaaaagatgcacaaggacgctatattttccatcaagatatgacttcaaaatctggtgatactctgcttggattaccagttaagaaagtcggcgataccttactaggtaaagctggagaagctaaggcttttattggtgacctgggtcgcggattattctttgccgatcgtcaaaatatcaacatgatgtggcagtggaatgacatatacgggtactatttagcaggagctttgagattcggtacaagtatggcagatgaaaaggcaggttatttcttaactgcagatattccaactcaagatattgtcaagcctgagattacgaccaaggaaaatccagatctagttaaaaaagaagaccaagctcaagatactggacaacactagctaggagttgatctaaatgactgattcaactggcgtaactgtagatgacttgcgggattacttagctagtgatgcaccagatgaatttctgcaacgtcttattgatgaagctgagtatgatgctcatcacattgttggtgatgatattccgattgagcgttgccggcagaatcgtgattttaaccaagcggttagaattctagctgactatgacaatgcgtcccgtggtgcacaagacagccaggcgcatgcctatcctagatcatttctttatcgcatgaatcaatgcaaatggacattgaggaggaatgcagatggctctgaataaatttacaggacgcagcttcaataaatcaattgtttttggtacaagtgtaaagacaagagatgaaaatgatggctctgaaaaaatgacgtttaaacgtcttctagggccttttcattgtgctccgtatattcgaactatgcaccagaattttgagcttatgggcactaaattttcaaatactcggcaagtatcaatcaatcatcaatgggttggtagcaaactgactcgcaaaatgaaatttgtgttgcttgatggtgaaatttatcaaattgttgataatggttctgatcaaacagataaccctaatggtgttgatattttgagtttgcaattagctgaagatattgaaatgccagaagaggtgagtgaagatggctagctttgaagatcaattagataattatcgtaaacaattgtctaaattggtaccgaatactgaacaaaagcttaaagctaataaagcaggtgcggaggtctaccaaaaacgtcttgctgaggttacaaaagcaaaacactattcaaacaaaaaagatgaaaagtatggacacatggctgatcatattgaaatttccgataaaaatagtgatgaagtagctgatggcagtgcaaccgttggttggccaaatcgatatcatgcaatgaatgcgatgcgtttaaatgatggaactgttcacattaaggctgatcactttgttgatattactcgtgaagaaagtaatgatgcagttgttgaagctcaagctaaggcattgggctttaagaaaggcggctagttatgaagttgccaattgtacaagttgctgacttacttgaagctgctaactttggttgggttgatccagaacacatctatactacaaatgtcactcccgatgaagatgattctggtaaaacaacatttattcgcattcaagacgctgtaggccgaatggcttactatgctaatgatattgcctttgcacaagttgctggtgtagaggtacaaatctttttcagcaacaaatggtcgaaattgaccaaaggtgaaaatttaacaatttatgatgcaaaagtcgcagttttgaagaagttgcaggctaatggttggaagattcaaaatcctttgaatcctgattctactgatcctgatacaggtcaaaaaactgcgactatttatgttacaaaaattttagaaatggagaattagaatggcagatacacaaacgactcaagaattagggtcatcaagtcatggtattaatcttgttactttggctttgcttaatccttctactggtactgttttaacgggtcctgaaggcttaagtgacaatgggattaagccaatttatcaaggaaatcaaggtgctacacaagccgaatatcaaaacctagagcgtgaaggtactaagcaatatgctaatgacacgcctaagcgtgttactcgccctactcaagcacctactgcaaacttaacgtttctcgacattgcttgggacactcttaacaagataactggatatgaacaaggtgaagatggtggttactcactttctggtggcgctaagccatattttgcaatgctcacacgtgcaacttttttagatggttcttcattatatgaagcttttgcatgcgccactgcaattttgccaactggtcaacaccaaactgataatgactcagagcaagatgctaacgttgctttaacagtcgacgctttccaaccaattaatcctgatgtctttaagcttaaaaatgggcatcaaatgccttatagacgttggaattctttagattcaaagtttgatcctgaaaagatgatggcacaagtgttccctggatataagccagatgacacaatgaaaattgtagtacctacttggaatggcacgtcagttgctacttcaagcaatgtaccaagtgttcaacctaagtcagataagtaattgaaaagtagggtgggtgtggtaggaaaactaataactatttatcaaggaacgggattcccattccttttctttcgaaaggattataaaaatgtcaaaaattattatcgatactaaaattttgccaattaaagctgatcaagttgaagttgttcctacaggcgcagtaggtgatatctcaagggagaccatgattaagcttttggaatcagctgatcctaaggaaaatgaagagtatgttgacttcattaagcgacaagcagatgcaaaaaaggctgcacttgatttattaaagttagtcttaggtttatcaaccaagcaaattgacaagatcaattcagaattagaggaaagcactattgataactatgtcggttacgttgagtcattacttcaaggtttagctactggttcatatgctgactttgaaaaggcgcaaaaagatgacggtgaggaagtcacagacccaaaatccgacgaagacgacgattaaaacaaatcaacgatttaaaggttcaagggcttcattataaaagattaaaacgggatatgttcttgatgcatgggacagatcctaaattgattgataatactgattattttgacttgatggaacttctaagcacaccagatgaagatccaatattctcagcttctgaacttttgagtccatctgcaaatcaagaacagagtttctacgatcaggacgacatttgggctgatgagtagatagaaaggaggtaaatatggtgaaaatcagcaacataatgtcgaccacgatcgacattaatacaattaaagcttctaattcacttaagtctttagatagcgccattagagctacaaccaatgcatggaaagctaatgaagcacgtgctaagtcagtgggtagtgcccttgaagcgtctaaatcacggtatgaaggtctaagcaaaaatattgaaaacgttaagtcaaaaattgggtacttaacggagcaacaatctaagcttgaccgaactactcaacaaggacaagaagagtacaataagtatgctaataaattagcgtctgctgaaaagcaacttgcttcaatgactgctcagcaagaccgagctaagcggtcaatggactatcaaaagacggggctagctggactgcagtcgtcttataagttgctgaatgaattaggcaatagccgaattcagcggcttgaagctgaaggtagacaatatgaagctaataagactaaattagccacttatcgtgcgtcaattactagcctaactaaacagcagaaactgcaggctgatgaactggttagaattggcaaagcttctggcgaagctagtgaagcttataaacgtcaacaaattaggctgaatcaaacttcaactactttagcaaaaactaaaaaagatatggatgaattgtcgggatctatgcgtaaagcaaacccgactttttttgatcgcttaaaaaataaaattagtagtgtcaacaaagaagctggtcaaactcataaaacttttaaagaagtatttgctggttcttttatcggcaacgctttgtcaaatgctgtatcaaacttaactggtaagcttaagggcgcagttagtgaaggtatggctcttaatgcagctactgctaagatcaatgctcgttttaagagtatgggcatgtctgctaaaggtattgagaccttagataagcaaattggtgacttaaaggctcaaaccaatatgactggtgataatgtagccaatttgcagactaagatgctcaactggtcaaacattggtactaagggtgccatgcaaatgactaagatgattgctggtgttggtgactcatctaaactatctggagaccaaattgagcagatgggtgcaagcctgatgcgtgttggctctactggtaaagtaacttattcggctctaaatcgagttactaagtcagctccaacatttatggcacaattggccaaaggtgccggcatgtcagaagacaaacttaaggcaatgcttaaaactggtaaagttacgcaaactcaattccagaagtggatggcatcagctgctaagtattctgacactgccttcaagggttttagctccacacaaggtggggcgcttaagtttatgcaagttagatggcagaaacttgagcagacaatgactaagcctctttttgatgctaagacctcaggcttgcaagcattaaaagatatcatggctagtccagagttacttaagggtgctaatgcaatcggtagtgccttgtcttcaaccattggctatatcgataagcacaaaaaagatattgccggtattacctccgacgttactcatattggtactgaattaggtaaagatttatggaaagatatctctggaattattggagatatcggtaagtcttttggcttaattcatggtaatactaagaaaactgaagatcctcttcacatggtcaagcttacaatggatggcttggccaaaaataagactgcaattcaatggataagtaaagctattattgcaatggctgcagttaaaggacttaaagccataaccagcccacttactgatttagcaaatatcaagattggcgataagtcgttaattggaatgctggccaacggcggtttgaaattcggcaaatggatgcttcatccgattaagaatgcaacagacgcaatggatacacttaaaatccatatgtggaatatgcatgatcgaattgagccgttgactaaggcttttaagagtggcttttccaagattggcaaatttgggcagtcttcctggaaagctattagtaaagcttggggcaaagcaagtgatttaggttctaaagctggcaaaaaaattgccaaaggctttagagcaactggcgatagcctatccagagctagtcgttggagctggaagaagattagatcaggttttgacggtgttaaaacctttggtcaaaagttaggtcagcaattagttgctggatttcaaaaatctattaaagttggccgagggcttttcacgcaaaaaggtggagcaggccctttaaatggcttgttacagtcagcacattctgccggcggattaaaaaatcttactactgcaggtaaagttggcactgcagcggctagtgtaggtgttgctgtagatgctgcaacttcaattgtcaaaggtatcaaggataaggtcggttcacgtaagcagtatgaagacatcggtactggtgcaggtaaagctatcggtggtggtatcggtctttggtttggtggccctttaggtgctgcaattggtgccaaaattggtgatgttgtcggcaaatggggcggtgacgctgttaagagtttccagaatggctggaataagaaaaagccacctaagaatttctggagcttggaaaatctcggctggtctgctcataacacgttcaataaaattggtaaatggggttctgatgtaggtaagaagtttggccaaagtctaagtaaaggcaagtcatgggttaagaaaaactcaaaagaacttgctttaactgcagttaatccgattgccggcattcctactttactttataagaacgatcctaagtttagaaaatgggctaatggagttggtaagactttcaagaaaggttttaattctgcaaagaagtcagtaactaatttcaataaatctgtttctaaaaatgtaagcaactttaataagtctgttggtaaaaaatatagacagattacaagtggcattggtaaaacctttaagaagggttgggatattgcgtataagcacgcttcaaaaggtactaaacaaattatgcgtagtactgagaagtttgctaagaactatatcaaaaccaacaagaaggctaattccgaaactgctaaaaactttggtagctttagcaaacgactaaagaagaatcatggcaatctttttaagacgcttggccaaactgcaaaaactcaattaaagattgagcagaagcgttggtcaagtaattggaagaatatcaagactactgcagctggcatttggaaaggtttgaatcaaaacgcctctggtatgtacaagaagcttgatactgccacgcatggaggcttaggtaaggtctttaatggcttcaaagattttggcaaaaatatcaaaaacttttgggatggcttatggaaaggcattactaagacttttgatgatactgtcaaaggtcttcaagatgctgcaggtaatatccagaaattctttactggtaaactaaaagttagcaacattcacctagccagcggaaccgattggaaaaagaagtatggctatcctgctattttaaatgatggccatgattcaccagcaacagggaatcgggaaggattgattcatgctgacggttccttggaaatcttacgtggtactaatatcaaacgttggatttttcccggcgaggatgtaattaatgctcatgatcttgctactttatttgatcgtggtgttcatcttgctaatggtactgtcaatttgcggcgtaacagcaaatcaagcaaattattatttaagaataatagcttaattgaaagagctttaaagctttataaggctgaggtaaagaagcgcgataagcggaacaaagatcgtaaagatcatagaaataaacttgatcgcaaacgtgagcaaaagaattccagttccaaggctgaaagagcaaaagccgcagtcagagccaaaaaagaacaagcgcagcttaaaaagttaggcgataggatttcgtcagcattaaagcataagaatggtaatgaagttcaccgtctgactgctgaatttaatcgtttaactaaaaaatattctgcagataagaaggcctctaagaagcctgatcctcatgctggtaaagttctcgttgatcaaggcttgctgattggagctaaatccagaattggtcattcagtttacattagtaagaaacttttcaagcaacttattgataatctgaataagaaatctaaaaagactaagagaaaaaagaccagatcaactagaaaacgcagaagtactcgtcgtagaactgctagatcaactagagccacgcgaagacgtatgaccacaagaaggcgatctacgtctactaggacaagatctactagttctggtgtttcaattaaggcttcagtatctggtggttctgcagttacttcattagcttctgctattaaggcacttaagtcaaaatcagtgaaaatcactgctaaagcttcaggaatcaaaacagtagcatcactagctaaagcttctaagaaaattaagggtagcagtcataaagtaactgttaaagcttcaggggttaaagcccttactaagctttataaggctaccaaaaagattaaaggtaagactcataaagttaaagtaaagacttcaggaactaaaggccttaaatctttacaaaagaacattacatcagttcataagcacattgattccttaactaaggcagcgaagaaagataaatttggtaaagacattgctaagcaagcagaagaggccgttaaatctttaaagggcaagggcaacttcgccaaacaattcgagtcaatgaccaagaagttcaataaagacttaaagaacatgactaagaattccaagaaagaattcaagtctatgtggtcagacattgaacatcaatctaagactggacaaagccgacttactcatgagatgagtactttttcaagtcactacaagaaggattggacttcacttgaaaatggtgtgcatcgggttttcagtcaattctggactaagatgagaactactgctggtcgtggagttaatggtgttcttagaattgttaactctgcggttggcaaaattgatactgttatttcagactttggtgggtccaagactgcagttaaacaagttggcttagttcactatgcttcaggtactggcgtatttggttcttcaatgagaagagcgattaccagaccgacccttgctgtcttaaatgatgggaacgattcaccagagactggcaataaagaaactatctggaacaaagcaacgaatactttcggagtcgtgcaaggtagaaatactccgatgctgcttggccctcagcatgaagttttcaatgcaaccgaatcgaagcttttaggttttacccattttgcttcaggtacaggtgcattaaagaaactttatgaaattgctaagcataattgggagcatcctaccaagacaggacaatcgatgttcaatgctgtgtctggcttaaccggagctatgaaagatttagctcaagggatgcggtctaagagtgaaaaccaaggcgtagcatggtggtctcaactatggaaaatggttgaggacaaagttaatgatgatgatcttggtcctgcatctggtttattaaaagcagttgaggaacttggtcaaaacaaacactacagtcaaggcaaaagaatgtctaagttttttgccgattgttcaagtttggtctcaagagctttgtctaagtattatcacgcaaattgggctactcctaatggctgggcattgaccgttgcagggctgtggcaacatgcacatagaatctctagatctgaggctaaaccaggtgatcctgttttctggcttcctgatactcacgtaggtatctatgcaggtcatggcagatattattctgcttatggtcctaatgatggtggcccagttggtatgcaagcagttgctccaggagctacttttggtagatttaatggtcttaatactgaaggaagcaaatctaaaggcgttaagatcaaagcaaatactgcccttcaaaagaaaatcaggggtcaagttggtcgaggattttggaagacaattcaaaaaatcgctgataaatacggcgaaaatgctggtatggttggtgcatttaagcttggcggtgatgttactcaacgcgctagagcaattgcgaatgcgttgaagaaagctgttccaggagcaactcgtgaaggtctagctggtattattggtagctgggtatttgaatccggcggtttgaatccttctgctattaaccctaatggtggggcagctggtctaggacaatggtttgaccgtaagcctctcttgctggcttatgctagaagacacggcaagagttggaaaaatccatctttgcaattagactttgctcttcatggcgatgattcacaagatactgcaacttttaagcgtatcttgaagagccacggcagtgctacatcattagcttatgctttttcacgtgaatgggaacgtggtggattcgatgcacaacatgcatctgctgctgaatctatttacaaagcattacatggttatgctaatggtggaattgtcaatacgcctcaacttgcaatgattggtgaaggtcgtggacctgaaacagtcattccttgggatatcagtaagcgttccagagcatatcagcttatgaatgcaacattagctcaatttaaacatgaagatggaaatgatgtagcagatagaagaaacagcaaatctgatgaggaaagccgagaatttagagaaacagttgtattgcttctgcagcaacttgtagaacaaaaagatgataaaaaagagaaggaagagcacgactttatgcaaggcgtgcttttacttttgcgccagatctttaataaatcgtctgttgctaacatcaagcttacaactcccgcaggtagaaccttgtgggaagttgttgagcctttcagtaaggcagaacaaagagctgcaatgatcaaattaagtcatgtggtaataagtcaaatgaaaggcgatgatatttgttctttttgatcataaatttgagtatatgaaactaagccttggtaaaggttgatttttttaatgttaaacttttgtttacttttaaatttagaccaatttttgaaattaagacctcggtgtcctgtacagtttgtcatctttgagcaatttaaagataactcgtactaattttcttgcagttaatgtgcaagcacgtttatgcggcgagtagacagcttcatcatacttcttttggtaatattttttgaaaacaggatcatgtaatcttgctagattggcagcttcaatcaagtaatatcttagatatctgtttccagtcctggccattggagtatgttcgttgctgtgatctcccgattgatattgattccaggttaggccggcatacttagccagctgttcttctttatcaaagcgatcgatacttccgatctcagcgataataccagctgtataggttttgccaataccgggaattgattccagaattttgctttctggtaatgcatcaacgatacgatcaattgctttttctagatctttaatagattcattaaagctttgaatcatgttgtaatgaacagaaagcactgcatcaattgaatcagtcattactttgcctaagcgatatgaacctctaacagctttcttaattgctttagccaaggtatctggatcggaaaagcgtcctctgcctttaacctgtaagtaagaaattaagtcttcggtaggcatatccgcgatctcatccagagttttactatcggttacaatagacatcattgtagcaccgaaaagaggagtattaatcttatctttatcgacagtgattagtttattaacccgataatataaagcttcaatgaagtgctgtttggtacgagtcagttcttgaactaattcatatctggtacgcgttaaacgctctaaagcaagatagttgtcttgtctggcaatgcttactcgataatgtccaaagcttagatacaaagcaatgtaataagcatcgagaggatcagttttactttcttcaaagactttatgaaacctgctggtttctttggggttaattacatcagtctctacattgagcttttgtaaatcttcgtcattttggaaaaagtaagcaggatgaaaactgtaaatagatgtagcttccatgccaataatgatttgatcatagtgtttattttgagctagatctaaaatttgttttttcagttcactagcaccataaagatcattgacaaagctatcgttaattaagcgtttgttttgatcttctgaatcaagtgcaacgacctgtaaatctttagaactaacatcaataccgacaaataatttcattggaaatggcctcctttctttcaaatttctgatcatagattttgatcttcacatgttaacccctaattacagttcttaagttcaatctcgccagtataagtattcactggttgcttctttgaaagctgcacctaatcccaattgctcaaggactagcaaaaagaagcaatcaatacagcatgtgagttagagcataaaggaactgtctgggtggcagacttataaagcagacaaaactgcaggaggtgataacctagaccagttgaccaaagccaatgacaattagaggctaacatgtgaagatcaaaaagcaaatactaatttgattaattatcacaatatgactaattacaatttatataatacgaggaggggattaagtggacgttgagtattcaggtttaatttttcaaggaaagaattcaagagacttaggttttacggtgcaatatccgtttaacctagttcatccggtagctgaccttgatgctactcacatcaaaggtcgtaacggtgactttttgcaagatgataactcttatcagaatgtcactgaaactttcactattgacgtggtgcgtcctacaaacgtatctcaatttgactatgagcgaactttgacagactggctggcttcacctgtaacaatgactcaaagaaagtatcaatatttacaatttgatgctgatcctgagtatgcttacagcgcgattcaaaaagatccttttagtctgcagtgggatgagagtgatccttaccatgcaaccggtacaattccattttactgtgaaccatttcaataccgtgttgatgggattgaatatatccctctacctgattctggtacagtttataatccagaattacgtgctgcagtcccaaactggcattttattgcaaacggtacttttactttaacggtgaatgatatgccttacgagtttgatcaaatgtcaggtgaattttggttatcgggtgatactcaagatacttatgacaaagataacaagctttataacaatcaggttaaaatgcctaatctttcagttccagtgttattaccagggcgaaacacaatttcaataactgcagagtctggcgtaataattcaaaaagcagaatacatgccaagatggaggaggttgatctaattggcgttaattacagttgggaaagttccagaagttgattatggccaatatgatcaacttctttcatatcctcatttgtataagtctttaaatgataatctctctcgacctggtttaactttaaaggatgcacttacttgtacagtaacttggaatcgcaatgagtatccaactctgcagatgacttatccgcgcgatggaattcatatgatcgacattcagcaagaccgttacatcatggaagattgtggttttaaatttgtgcatcagcttttcaagatcacacacataacacaagagttagatcaggtggtagttagtgcggaacatatagctgctacacttaatgattcaactgtttctgatcaaattcaatttgctaatgctagtcctcaagatttgatgaatcaagttttgaatacaatgcaaccacaaaaagaatttaaatttgattccaacgtatcaaaggtaagtaatgttaatgttgaaggtggccaacaagctggttctatcctgattaatccggatcaggaaggagatcaagctgttaattcagttcttggcctttatggtggtgaactagaatttgacaactttgaaattcatcatagtgaacatgcaggaatggatactggtattgtcattgactatggtaaaaatatgtcgggtttccaacatgatatttctaccgaaaatatgtggactggtgcagtaggaattgcaaaatatactcctggtcaagctatagcaaaagctgattgggacggctggtctagttggtcaagtgactattctaatgttggtatttatgcagccggcggaaccgttgaaattttcaattctcctgtggaagggcataccgctattggtactttgagtacaggaatgaaacttcatttaggaaccgcaattcatgatggtgattttactcctgatggaaaacttcaaattaataccgttaatggagatgattggtatcctgttgctccggaagatggtggcggctttgttgatgctagatggatcagtttcgataaatctggaagttatatggttaatgacgttactggatcattaaccgtacaggctcaagatcctaatgatgaaagtggtgctgggtctcgtgtaagcatgtctggtaatgcggttgttgcttataaacctggtggatcaatacatgtgtacatgtcgcctgaaattggtcctgatcataaaagaatacctggatggactgttaaaaacggtacatctattcactacgatatgattgaacgaaatcaaaatggcgatatctggtatcgtattggacctggccaatggttgtatggaccacacttatcgcttacgcaaaacggcgcttatcaaagttatagcaactctggctatggatatttgaagaaaaatcaaaccaaatatcattgggattccaagcatcataaaatggtagctacaactaaaactgtaactactggtggcaagagtaagaatcataaatcaggacgttattggaaatctaaaactaaaaaagttaaagtacatgctaaaactggtcatgtaacgattgataagactattgttcaaggtggtcatacttatatgcatactaagtatggttgggtaagttccggttcaatcgattataagcacaatggttctgttaagccttcttcaactgatgatattcttaagcaacgactgaaagataaatctaaagttgagatttatgccacaccagataaaaataatgctcttaactggtcaattcctagtggtacacaaattactattgattctggtcatgaagcgaaaggtggggacggtaaaacctatgtcgaagtaacttatgccggcaaaactggctggcttccagaagacaacattgactctgataaatcaaacttggttgcacctgatgcaacagacgatgattctggctctgatgctaatgccaacatcgatgcaacaacccataatgaagtaactgtaaaagttggcccattgtatgttgacggctttggtaataatcctaacgtagacaaggtaactactgttgatcttagttcttatgttaagcatgatgatcaggatttatccggtcaacaagcggatggaacttttatagctacgcaagacgatataaggcaagctacggaagcacttaagaattatatgattgagcaccgttttggtaaattagaaattcaagatacaatcaactaccaggaaatgtcagctctgaatgctgataaggttcagttaagtctttatgattatgtaactgctaagtacgataagtaccatctcagagaaaaagaagaaattaacagtttcatttgggatggactagctcaacactatcagcaaattactattggtaaactaccaattgcctggcagcacttgctactccagcaagctaaagatcaagcagctagtgcggctggtgcttataccaaacgtacgcagggctggcttaaccgatttgaagatatgatgcattctgaaaagtcagatcgtcgagccaaagaaaatgccatgatggaagatcttggaatgcttcaacatgacatcacttggaaagacgataaaggcaaagagcataaacttaaagatgtttttcttgaaactcgtaaagaatttgaagaacactttcaacaacttgatgatgatgcttcagatattaaatcttggattgatcagccgggcgaaggtatcatccaggcagtacctaactggcaagcaccacaacagctaactgcacgttcgagcaatggcggaaaaatggtgtttggtggcaatggactagaattctatgatgaacgttctcagaaattgctaaccggtatggactcacgcggtaaactttatgctgacagtattgaaggcgtaaaagttaatgcgatggagattgatgctcttttaatgcacggaaatttaaagagtgaagatcctaatggttcaatgaaaatttacattggtacgcaaaatcccggatctacgctgaatccatggcaatcagggcgagttatctgggtgacttcagataactatgcttctatgatgtcatccggacaatttgcaacgaccagtggtagtcatatcactcgaattcaccctagtgctatcactgtggatgatgaggacaatcaagttttgacgcaaagaaactttgctgggcacgcttatcgaagaatcaagtcttgggtgcgtgcctgggttgccgattggataaccattagaggtactaagcactggatttggaaaggctctgacaacgttgatatgggtaagctgagagatttaccaggacaaggtaggaatgactatagatatattcctggtagtaatgatgactggggcagtgatgaagctggcacattagatggaattgatctaggaagtctagtatttgatagtgaccttcaagaaatgaatcaacagtggcagaattcctttaatgatcttaaaaacggttatacgaatatcactgtgccttcaacgcctgatatttcgacaaatccagggcaaattactacagatgtggatagtacttcatctaaagtgggaatgcttaactatactgaagcatacaatcgtggtttgggtcctaagagtggtcattatactgaagctgttggtactatgatgggcggaaatgatggccatatgtatgtattgaagttatatacgcctacaggcaataaacactggtatagagttcaataaggagaatcaaatgaatgataaagtggcagaaacattagcaattaacaccggaaatatgattgcttcacttaatgttcaagtagcaaagctgcaggttgctaataagaatcaaactgaggcaattgatgaattgaaagcggaaaatgacaagctaaaaatcgaaaatgctgcgctaagaaagaaggtgaaagcaaatgagtctggcgcaaatagtactaacaaccaacaagaccacaagtaatgtcggtgactatgttcgaaagattggacaaggtgaacgagggcaggttttgccggtcgtagtcactgatgctaatggtgcggcgtatgatcttaccaacaaaagcattgtattttccgaaaataaagactccggcaagtatgtcgtggatgatgggaaagcttcgactagcggcaaatttactttgactgatccccaaaatggcaagttctcttatacattgcaagaccaagtttatccggaatccggtacagcatggtttgatatcgtgagttctgatggaactgttcttgataccacggtaacttttaagtttgtcgtaatacctaatgctactttgcatgttgattctgacagttactcgtccacactagaagccttgcaagcccactatcagggtgtaatcaagaatactgaagttcaaacacaaaacctaattaatagcctgactgataaaatcaatcgggctatttctaatggacaaaacgatattacaaatgaattaagtgatgcaagagctaagcttcaagctatccaagatcaagaaaataagcttgtttccaattggacaaccgagttaaatactcagaaacaaaattttgccactttacagtctcagtggcaggagcaatctaagtcaatttcggacagttatcaagctaaaattaatgaaatcaacacacaagctcaatctcagcatgacgatattcaggctgcagctgatcagcaacttaaagccaaccaatcagctaatgatgctgaaattgcaaaaatcagatctgatgcacaagcgcaacacgaccagattgagaaagccaaaaatgatgcgattgctgaattaactgctcagagggatgcacaacttgaagcagctaaggatgcttatgacaagcaacgcaatgatcaacaaaccgactatgaatcttggaaagaagcacagattgctgactttactaaattggttgagccacttaaaaccgagatcactactgatcgtcaagatcttaaagacatcagtgatcaaattgcggctactaagaaagaaatggttaacttgtccaaccaactggacagcattgacctaaccaagttcgtaacaggtaaccagtttaaagaagctatggccactaaagctagcggtttaaaagtacgaggaatagaaggtgattatgttatggcagtagatacaacgacgagcaatattgatggcacgcctgcaggtaataacggatctggtttggttgattcgaccgttttggctggagtaatgcagactattagtgatgctatcttgggcaagaatcactacacaaaggatgaagttgataacttgcttaaaggcgttaaggacaaattgacgcctttaattgagcagaaggcagataccacaacgctaaccgatagggctaatgctttagctcagcaaattggcgatctgcaaacagaaaatagcaatttgaagaatgttaacacacaattgcaacaacaaaatgacaatttgcaaaagcaagtaactaagctaacacctgttcatgtaacgagtgaggcagatgtagcaaatcaagatgctttttgggtaattgtagatgactaacgattttttatgcaacgacagtctttttaagactgtttttattttggaaaggagaaaaacatggcaagtattttcttaacaggtaaaaataatccaattgaattagctgaaaagaaggatattgttaatcctaacttattaactggtaccgcagatttcagtggtgataattgggattatcaaaacacttcttcacgcgatcctaatactaaagcacttaacggcaatatatgtgcaaaagaagcacagtggagccaagtatatcaagttgttaatgttgtagctggtcaattctatacttttagtgttgaaacgagtaacggatatgctatgatttttgctcaagcacctgatggcacttcctctgattactttgcaggatcaggctctgttcagcagagtttcaacactaacacttggcacaggttttcagctacatgggaatgcgtaaaatctggtcaagttaggttttttgaagctcaaggggtcgaacactatgttgctaatatgaaactggaaataggcacagttgccacaccatggtgtccagcatatgctgattatgtaatgaaatctgacttagatgctctaaaagccgaaattgaccaattaaagcaaaataagtaaggcttacgttttatgaagaatgatagtagaccgccaccagcggtcttttttgatacaaaaaattactagtaaagaaaagaaaggaaacattatgactgaagaaacacaaaatgcacctgtggcaggtgcagaaaccgaacaacaaaatgtggccaacaatggccaagctactaataccgaacaaaagtctaagactctaggcgatatcttacctggtgaagggactaaccttgtttatgtatcaggcatgctgcaaggcgtacaagtagactgcgaaggccctattgaatacactcgtaaactgacgcatccacaatggccattcattcccgccttaccacagtacgatccaagcaaatgcaagactccaaagtttgactggggcaaaggcgaatgggtagatgaaagtgaagaagctagagttaaacagcttaatgatttaaccaaaaaggttgcttcaatcacgaccgatgtgggtaagattcaagaaactcaagaagccgctgcacaagaaaaagaggctagcgacaagaaagatgatcaagtctttaagctaatttccgctatgaatgttcaattaggtgttatcaacgctaagcttagtcaagttgcttctaagaacgacgatactcccgctaagcctgccacacctgctcaaaatactcaaaacagtgcaaccactgaaggaggtgttcaataatgtttgaaatttacaaaatggaattcgacattgggatcgtaaccgctgctgatcttaaaagttatatcggcatgggaatccttagtcaacctgactatgaaagaatcgtgggtgatgagtctcatgaagaaagcaattcaacgcctgaagtccaagcttaatgtccgcaactgtgaattgctgatcggtctctttatcttaggcaaaggcgtgtggctttatcatgacagtcactactttatctacccgccacaatttcaaagtattgaaaatagtcgctatatcgacttagggctaatccttttgggtgccttgttgatgataacggcttttttagtgccttacatgcgatcaaccaagcgaaaaatccagctgattatcgtcagcaaagtatttttagtgttggctggagttgtgtgcatggtcttagctttactgcaaatcacgcatggcattttcacgcctttttatcggatggggcactctgcttggggtgacttaatcatttttggctttgtctatctgacagctagcgacgcctaaggaggtgccgcatgaaagatattggaaacgtgatagggtatctgataactgctgtcgggggtctaataagtgccatcacgcttttttacaaagcttttagtagtaataagcaaaatacgcttactaacatgctggcagaaaaagatagagagattaagcaaaaggctgaggatatggagctttaccgcaaaagatggctcaaggttgaaaaggaaaatgaccgattgaaaaagaaattggaggaattagaaaatgacgattaaagattggattgaagtgggttttttagcttcatggattgtatgcttaattggtgtaggcgttatgtcgcatctacactttaaaaataagaaagctgaaaattatcgtgttgccgccctccatgctatgcaaaagtgggtggcattctatgacaaagaagacttagacaatcctgaaaaagctaatggtgccttaaatgatgttgttaaggaattaaattcaaagggctacaaggtaactgatcagcaagctagagatttagaagctttacgtgagtgggttttagctcaattgcgcatgaagcaagctcaatcaggtgtggaagatgcagaaattgctaaagacgtaccagctgaagatattctaagcccagttgaccagctccctaagattgatgcaccagctacaaccactgaaggtgattctaatggcaagtagagaatatctggttgatgtggctgcatatcagcctagttcaatgaatgcttatcacaaagctggtgccaagggtgtactgatcaaagcaactgaaggtacatggtataaaagccctgtagcaggtgcacaagtcaagtcagcacataagtatcatatgtttgtgcatatttatcactttgctacttttggtgcttcggttagccgtgctaaagttgaagctaagatttttgtggcacgggctgaatatcttggcatcagtaaaaagcgctatttagcttgtgattgggaagtcggagatgggaacaatgtctatggtggtaaagtagctagcgccaaagcaattatcgcttttatggaggtttgtgctaaagctggctacaaagtattgctttactcaggtgctagcttgcttagaaacaacattgatactaagcaaattgtaaagaagtatggcacctgcatctgggtagcatcttatccaaccgactcggcttataagccagacttcaactatttcccatcgatgaacggtatagctatctggcaattctgtgataactggaaagggcttggcgtggacggcaacattagcttgattgacctccacaaagaaactacgactgtacataaggcagctaagccgaccgaaaaaactaagccaaaaccagaaaaaaagaacggtgtagcatatgcgccgattattaaccgcaaccctaactggatgatccagttaatggatagcgctggtcattatactggtaagtacatcaagacaaatacgagatggaagtactttgatgtcaagactattaaaggcatgaaatgttataagctaggtactgataagcagtgggtacctgcaaaatatttaaaagtaattgaatagaaggagttgaaaactccaaatatcgtaaagaccgctctgggacaatgatcctagagcggtctttttttgcgtatttttttaatatttttattgatttcgtacgtttgtgcaaagttaagctgataaattgtattattacagtgttctaataaaactgaaaagcaaaattcgatataatttcagattagacattaaagaccgccgtatgatttaggcggcttttttactaaataattgattagtaaaactttacactaaataaaagttttatatttttaaggtttaaagtgctcatgataaactaaaagagtaaattaaatctattgataataatgaggcctaaaaaaggcctaatttttagaatactcaaggagattttcaaagaatgacagagaacaataaacaagccgaaggcactgataccaaggcaaaagccaactacgacacagcaatcttcgctggcggttgtttttggtgcatggtcgaacctttcgatacagttgacggagtagaaaaagtagtttctggttatactggtggtcatgttgctaatccaacatatgagcaagtctgttcaggtacgactggccatactgaagctgttgagattacctttgatccagcaaaaatatcgtatgatcaattgctaaactattattggcaagtgactgatcccacagatgcaatggggcaattccaagatcgtggtgataattatcgacctgtaattttttataattcacctgctcaaaaagaagcagctgaaaaatctaagcaaagattacaagctagtggtaaatttgataaaccaatcgtaactaaaattgaaccagctaagccattttatccagctgaggaatatcaccaagatttttataaaaaagatccacttagatatgcaatggaagaagctggtggaagagctaagtttatcaaggaacattgggattaataaaaagcagatcataactgttataagctgtgacctgcttttttactttcaatattttagattatgttaactatttctttaagttgcttttgataacctcgattggattgagccaagttccgttgttaacgttccaattcttacatggaaaaccatatttgtttatgtaatctttatttgtttgagtaacgccaaggtgtaagtgtgagccagttagcttaccgatcttttgacctaatttaatcttttgaccagtcttaacataaatgtcttttttcttattaaacccttcttggtaaacttcaacgtaattatcaggactaataacccagatgaaccagccaaggccgttgccataagcaacctttttaacagtaccttgatgaattgcatatacgttagaatgcccaacttctgaaaaaccaaaatcccaaccatcatgaaagtaggaaggtggtgtagtagaacgcatatagttagttatgccaaaagtttgtgcattatacattggacgaacaccatttttcttgttggctttaaacggataagcccacttgaggttcttgggttgaacttcagttgtattttgtgagtcatcaagcgtatcagcagaagcagtggtggttgataaaccaacgcttgaagttaataatgcagtacctaacaaagaaattattaatttacgaaatttcattataaaaagaaaccagataagttctgatttttatctcctctcttaattcacctaaactattgtagctcagcagttttacgagaaagttacaattaaatttcgattaataacaaaaagttagtatgagtatatgtgaatatgtttttaattacgagtctaggtatttttgaaatttctttactttattttgggatttacatagaattaaattaataacgtttacattgaatttagtaaatgatagtagacattaatttggctcaaaaataataatttggacaatgaaagtgaaactgtcaaatcttttgtgtaaatagttctttctcgtaaattgattttttaattatttacttaaacttcccacacgcagaatcgctccttttattgtgattctgcgttttttaacaaatataaaaggcacatgaccttttcattgctataattaaagtgaccaaacgataattctatgcatgaaaggcttgtgccaatgtctattttaccatctcctgaccaaaaaaatgaacaactattttcaaactcaatcatcagcttcatcaagaagtttcaggtgatcaagctgttgagaaaatgtggcttccgcaaggaaaaaggcattagcctgttcagcttgtttctttacgttttaagcaatgtctttcgtgaccgcagcttatatatgcagctgaaaacggatcattttaaagaaagcttttctaaaaattcttattaccgatttatgcgcaacgtccacgtcaattggctccacttcaccacactgctttctgcgcaaatcattaataatcacttgcgatctttgacttcagaaaaacgggctgattgctttgttgtcgatgattcctacttctctaggaccggcttcaagaaaacagaattagtcgccaaagtttttgaccatgtatcaatgacttacaagaaaggttttcgcatgatgaccctgggctggactgatggagcttctttcatgccaatcaattcggtgttgctgtcctctcacaagctacagaatatgattggcgaaaacaaagtctgtgatcagcgcaccattgctggcaaaagacgcatgcttgcccggactaaaggcacagacgtgatggttaatttaatcgaccaagctatgaaagcaggtcatcaagccaagtacgtgctgtttgacagctggttctcaaatccacatcaaatcgtccagctcaagcaaaggaagctggatgtaattgccatggttaaagttagctccaaaatcaaatatgaatttgaaggagaacgcaaaaacatcaaacagatttatcgtagctgtaaaaagcgacgcgggcgttcgcgctatatgttgtcaattccagtcaaggttggccgccaagacaaagacggtgctaaaattgacgctcggataatttgcgttagaaaccgtgccaatcgtaaagagtggctggctattatttgtaccgacatgtcgcttagcgaagatgaagtcattcgcaattatggcaaacgctgggatattgaagtttttttcaaaacctgcaaaagctacctaaaactaagcacggaatatcatggtctgtcctacgatgccttgactgctcatgtggctatagtctttacccgctatatgctcatgtcagtagccaagcgggacgacgaagatgagcgaaccttaggtgagcttttctattgcatgattgatgagctggcggatattacattcagtcattcacttcagctaatcacaaaagcaatggtggctagcgttgaaaaagtctttcatgccagtgaagcacaaatagcagaattcacggctgactttatcaatcgtttacccaaatacatgcaaaaattgttaaagaaaactagcaaaaatagtatagaagcccaaagctaagcaatatcaaagaattgccagcttatttgatgtgggaagtttaagttatttatttaatcaaagtaggattctaaggtgtcctgaacctgaccaaagcctttatgaattcgattgaaataacggtcattgtagctcattgcctgaatgccaataaaagcatcaagcgactgttcagttggaaactctgccttaggcttagctttgcgcttgatcacattgttaaatgattcaatcatgttagtcgaataaattgaagctctgatctgcttgggatagttataaaagaccagcagatctggttctatgtctttcaagcttctgataacatggctgtaaaccttgccccatttggtatagaagtcatgcaggacagctgtggcttcttctttgtttgtctgttgatgcacctgtttgaattcgttcatgatcttttcacgatcgtcgacgcgtactttagcgcagatattgcgcatgacatgaaccaaacagcgttgaaaatgagctttaggataagtcctggccaaggctgttttcatgccaacaacaccatcagaaagaaaaagctcaacttgctttaagcctcgggatttcatgttttgaagcatatctgtccagacttcaatgttctcgctaggtgcaatgcagtagtcaatgacctccttgtgcccattaggcttgatgccaatggcaatatagactgcttcacgctcaaatgtttctcggcgcaaaggaaggtatgtcgcatccaaatagacgcagaaaaacttgtcgcttagcttgcgtttgtggtaagcctcaacctttggaatcatctgcttggaaatatttgatacctgagctggactgtaatggctgccatacatcttttcaattagatcggctatttccctggtggtcacgcccttggagtaaagcttgataatcatgctttccaagatatccgagtgctgcttgtagccaggcagcgtgtgctgatgaaactgaccgttgcgatcccgaggcacttgcacttcaattgggccaaattgcgtatcaactttgcggaaataagcaccatttctagagttgccagtattccagccatttctggcatagggatcatagcccagaaaggcagtcaattcagcttctagcaatttattaacagcctgttgtagctctttgcgcaataaatcatttattttgtctggattgaatagagcttgagcaaaatctttggtaaaatcattcatgaaggagttcttctttctgtatgtgtttttttgttcaaaccaatcatacgagaaaggaactcctttttctaatgtttaaagaaataaatttaaggaatcattcatccttacacaaactattttacagtctcatgaaagtagagaataataatgacgaagttaaataatgaatatatggttggtctagatattggtactaattcatgtgggtgggttgctactgattttgataataatatattaaaaatgcatggaaaaagagcacttggctcgcacttgtttgatgaaggcgtatcagctgctgatagacgagcttttagaactactaggaggcgtataaagcgaagaaaatggcgtcttaaattgttggaagaaatttttgatgaagaaatggcaaaggtagatccaaatttctttgctcgtttaaaagagtcaggactttctccattggacacaaggaaaaatgtgtcttcaattgtctttccaactaaaaaaatggataaacaattttataaaaaatttccaactatttatcatttaagaaacgctttaatgaaacaggataagaagtttgatcttcgggctatttatattgccattcatcatatcgtgaaatatcgaggaaattttttgtctaattcatccataagtaattttagtgcgtcaaagattgaaatcgataggtttgtaaatgaactaaacgatctttattccatatttctgccagaaagtggagtgatttttgatgcaggaaatgcttcaaaagttgaagacattattcgaaatgaacaaatgtttaaactggataagataaaagaaattgctgatgtgttacccgacactgaaaataagtctggtctaaaactaagtaaaaaaatttcaaaagaaattagcaaagcaattttaggatacaaagcaaaatttgaaattattttacaagtaaatgtagacaagactgacagctcaatttggaattttaaattaaatgatgaaaatgcggatgtaaatttgagtgaaattacttctgatttaactgatactcagttacagatattggatttagttagaaacttatttagtgcaatttctctactgaatattgtcgatgaaggttcaactttatcggaatctatgataagaaaatataacgatcatgcccaagatttgaaattgctaaaaacagtaatcaagaaccattcagacaggaaaaaagctcacaatttacagttggcttacgacaaatatgtcaataaccgtcattttgttgatgttgaaactaaaaaagcctttcccaacaagcacctttatcgaaaaagcgatttttatgaaatagttaaaaagaatttggatgcatcaaaagaggcagttcaaattagaaaagaaatagcgttagataagtttatgcctaagcaacgaagcgatgaaaacggcgtaattcccttccagcttaatcaaatcgagctagataagataattgaaaatcagggaaaatattatccatttttaaaagagattaatccaattaaagctcatcgtatgcaggcaccttataagcttgatgaactgattcgttttagggtgccatactatgttggtccaatgattgaaccaacaaattcatcttatcctcaaactcgacaaaatcaatcttttgcttggatggttagaaaagctaaaggtcgaattacgccttggaattttgatgaaaaagttgatagacaaaagtctgcaaataactttattaaacgacttacaacaaaagatacttatttgtttggtgaagatgttcttccagcaaatagtcttttatatcaaaaatatactgttttggatgaattaaataaaattagtgtgaatgggaagaaattatctgttagcgtaaagcaagaactttatgaggacttattcaaaaagaataatactgtctcagctaagcagcttaaaaattggttaatagaaaatcagaaattgccttatatcaaaattaaggggttagctgatcaaactaaatttaattctagtttatctacatacattaaattaaaaaagtcaggtttatttgttgataaacttgactcaaatgaatttcgtgatgattttgaaaaaattattgaatggtcaactatttttgaagataagcagatttatatacaaaagcttcaaacaattgattggcttacagcaaaacaaattcaattcctacaaaatattagacttcagggttggggcagattatctaaaaaattgttaactgctattgtagattcaaatggtcaaaatattattgagcagttgtggaatagccaacaaattttcatgagtatagtaaataaagcagatataaaaggcacaattacagatgcaaatcaagatctcatgcattcaaatagtatggaagatattttatcagaagcgtatacttctcctgcaaataagaaaatgattaggcaggttgtaaaagttgttcatgacattcaaaaagctgcttctggtcaagcacctaaacaaatagctattgaatttgcacgtgaaagtagaagaaattctaagttatcacaaacacgagggcataagctacaggatatttaccaaaaaatatcaggagatatagtaaataaaaatttgaaggataagctggctgaatatatcaagaataatcaattaaataaagataaatattatacgcgtggtgctagttaaatcgttttagttaataaaaaagtccaatcttgttagactcgacttgtaaatagtaataatagaaaagagtctgatctgattgaactgccttaagcttaagcgttttagccaccatttacaagttagttttaaagatttagtgataatttgtcggcactggtatcgtttgtatgcaccggctgagtttactcatcggcgaaatattgatcaaattaaaactacggacagtctgattttggctttacttatctggcaagctaagacaggaattgaatcacaaagaagattctgtgaatgtttcaattgtttatcacactcacgttttaatcggcgttcacgtcagctattgcaattgatttatcagatacggcaagaaatgaataaaaaggttgacctgaatggacagttcttgatcattgacagctttccggtacctgtttgccaaccaattcgaaactatcgtgctaaaatttttcgcggttatgccaacattggttataaggccaccaagaaaatttacttctatggtttcaaagttcatgccattgttagcgatgacggttacattcttgattatgtcgtaacaaaggcatcagttcatgatgccagggagacagttgaactgatagaaaatacccatccatctaattactatcttcttggcgacgaaggctatttaggcaaagaactgcatcaacagctaaaacaaatgggttacgaactttggacaccatatcgtaaaaatatgacaggagctaaaaagcacaatgatcatcaattgatggctattcgcagaacaattgaaagcgacttttcgcttctgacctattacaatgccgagaacaatcgagcacgtagtctgataggctttcaaagccggttggaaattgcaattttagcttataatttggcttattgtctagaacgatttaactagcaccacgcgtaaatattatctttatttcatgcaacttggaagagatgcttatactggtaagccaattaatattgatgaagtatctcagtattatgacatagaccatatcttgcctcaaagttttattaaagatgattccctgaataatcgtgtgttggttgctaaaccaataaacaatggtaagtcagatggagttcctttaaaactctttggtgataatctagctactggtttagggataacggttaagcagatgtggaataactgggctgataaaggactgattaataaagcaaaacaaaataatttattcctagatccagagaatattaataaacatcaagcttcaggttttattcgtaaacaattagttgagacaagtcaaatcataaaattagcaactacaattcttcaagctgagtatccaaagactaaaataatagttgtcaaggctagttctaatcactatttacgtaatgagtttgatttgtataaaagtcgagaggttaatgattatcaccatgcaattgatgcatatttaactactatttgtgggaatctactgtatcaagcgtatcctaaattacggccattctttgtttatggtcaatttaaaaagtttagttctgatcctaaaaaagaaaatgaaattttaaaaaagaccaaaaattttgactttgttgccaaacttttgggtagtaaagcaccaaatgagatcagatctcaacaggggaaagttttatttgaaaagaataaaattcgattgcaacttaataaggcatataattacaaatatatgcttgtatctagagatacgacaacaaagaatcaagagatgtttggaatgactatatatcctcgggctgaacgggatatagcgaagagtcgtaaattaattgaaaaacgtaaaggattttcaacagatatttatggtggctatactggtactgcagcagcctatatggcaattgtaagaattaataagactaaatcttcacagtacaaagtaattgctgtacctatgacgaagcgtgctattttaaataaagctgaaaaagaaggtaactatgaaaagattctaaagcaaattttatcaccaagtattttatacaacgataagggaaaacgaaaagcaggagtaatatcatttgatattattaaaggtaaagttccatataaccaggttgtgcaagatggcaataaaaaatttttgttaaagagtgctatttatttatgtaatgcaaaacagttggttttatcagaagaggcaatgagagtaattactggtcattggctagattctgataagcaagatcaagaacttttggatgtttacgatgaaattttagaaaagattgatagatatttacctttgtttgacattagagattttagaaataaattacataagggtagagaaaaattcttgaaattaaacgctgaggataagtttaaagctattattcaaattttgaagggtttgcatgataattctgatacaggtgaacttaaagatattggtataactgtaccatttggtcaacttcaaaataattctggaattacattatcttcggacactattttagtttatcaatcacctactggtttgtttgaaaaacgcgttaagatttctagtttataaaaataaatgaggaaccgacatgtggttcctcatttttacataaaaaaagtccctcgatagctcgggacaagtgttgaaactctgcgtactaaaacgcattgcttgattttaaattatgattgttagatcaataaggttaagagttgggagctacccaacaaataaataatatcattatagatatagatgtacaaggagaaaaaatgggatggcgtaacgtaataataactcagcatgcaaagctaacatactctatgaatatgcttatagtccaaacaaaagatggtattaatcaaatacctattgaagatatcaatttggttttaatttcaacatcacaggctgtgattactagtgctttgataagtaagttagccaaaaatcaatgcaaggtaatctttgttgatgataaatatcaacctgttacagagacagtgaattattatcctggggctagggacataaagaagttgaaaatgcaatttgaatggaatgaaagaagaaaagaaaatttatggaccaaaattgtagctgctaagctaaaaaatcaaatatcggtgttaaaaaattatcgaattgatgaaactgaagttgagcaagagctgtacaagttagaggtgaacgatttatccaatagagaagcagcggctgctagaaaatatttcatgaagttatttggtaaggactttattagaagaaattccggagtgattaatgcagcactagattatggatactcaatattgctttcatccttcgatagagaaattgcaatgaatggatatttgacttatctgggaatacatcatcattcagtggaaaatcaatttaatttagcttgtgatttaatggaaccatttagatccatagttgattattgggttaaggcacacgaaaatattaccagttttacaccagatattaagtatggattagttgagttgcttagcttacaaataaaattcaatggtaggaatacaattttaacgaatgcaatttctgtatatgtaagaagctgccttagatatttaagtggagaaacagatgatattagaatagagatgagtttgtgtaatgaggtaccgaatgatgcgattaatgataatgtttgatttgcctacggacactgccgctgaaagaaaagaatatcgacaatttagaaaagctctaataaatgaaggatttttaatgattcagttttcggtgtatgaaagagtatgtgtcactagacaaacagctaattttttagaaaagagaataagaaaatttatgcctagcaaaggtgttgtgcaaagtctaatggttacggaaaaacagtacagtgatatgcatttcttggttggggatgcagtaaaagatattcgcaatacttcagacaggacagtgatactatgattgtttcctatttgtcacataagaaaatctgtttaaaagatggaattaatgttatttgcactcaaagtcccattgcctataaagatctggttttaggttttcaagccttaaatgatctaatagtatgttctgatgacgaatacaacaataagtctattagtaagagttttgattttgcaggagccccgttgttaaatgacaatattatggcaaagtatatgaatgtcattattaagaactttatttctaacttggatgaggtaaacagaaatagaattttaaaatctttttattcattagaaacagtattgaatgattctttgcttttggaagatttacctttagaaattgattttagcgaagatattaaaaagctgttgaaaatggttaacattcatttagatgctcaattaatgttaacgagactgtaaaatagtttgtgtaaggatgaataattccttaaatttatttctttaaacattagaaaaaggagttcctttctcgtatgattggtttgaacaaaaaaacacatacagaaagaagaactccttcatgaatgattttaccaaaaatatagcacaagctctattcaatccagacaaaataaacgatttattgcgcaaagagctacaacaggctgttaataacttgctagaagctgaattgactgcctttctgggctatgatccctatgccagaaatggctggaatactggcaattctagaaatggtgcttatttccgcaaggttgatacccagtttggaccaattgaagtgcaagtgcctcgagatcgcaacggccagtttcatcagcacacgctgcctgactacaagcagcactctgatgttttggaaagcacgattatcaagctctactccaaaggcgtaactaccagagaaatcgctgacttgattgagaaaatgtatggcagtcattatagtccagcccaagtatcaaatatttccaagcagatgctccccaaggttgaggcttatcacaagcgcaagctaagcgacaagtttttctgtgtctatttggatgcgacataccttcctttgcgccgagaaacgtttgagcgtgaagcagtctatattgccattggcattaaacctaatggacataaagaagtcattgactactgcattgcgcctagtgagaacattgaagtctggacagagatgcttcaaaacatgaagtccagaggcttgaagcaagttgagctctttctttctgatggtgttgttggcatgaaagcggccttgaccaggacttatcctaaagctcattttcaacgctgcttggttcatgtcatgcgcaatatctgtgctaaagtccgggtggatgaccgcgaaaagatcatgaacgaattcaaacaggtgcatcaacagacaaacaaagaagaagccacagctgtcctgcatgacttctataccaaatggggcaaggtttacagccatgttatcagaagcttgaaagacatagaaccagatctgctggtcttttataactatcccaagcagatcagagcttcaatttattcgactaacatgattgaatcatttaacaatgtgatcaagcgcaaagctaagcctaaggcagagtttccaactgaacagtcgcttgatgcttttattggcattcaggcaatgagctacaatgaccgttatttcaatcgaattcataaaggctttggtcaggttcaggacaccttagaatcctactttgattaaataaataattaaaaaatcaatttacgagaaagatctatttacacaaaagatttgacagtttcatgttaacaccatatgctataattgaaacagttcttaagattcatcaagaatataatcttgatagtattcccgtgttttgtaatgtagctcattaccttgatgaaacacagttaaaagaacttagtaagattgttagacaacttaaattgaaaattattttaattgaattcacagataagaaatatggggtagcagtcaaggatgctcaagttgcatatattgatcgagatcttgttgattggtattagacaattgattaaaaagatattatgaaatatcggttttagatgattgttagatcaatgaggtttagatctagaagatggtacaaataaaccattttctagttttagatgattgttagatcaatgaggtttagatcaaatgcttttcacgatggaccggatttatagttttagatgattgttagatcaatgaggtttagatcccgtgaaaacggcgtttacatgcgtaagacgttttagatggttgttagatcaatgaggtttagatctattagcttttgcggcggtaccaacgtacggttttagatcaatgaggtttagatcccactatcgcgcctggaatacctgttttctgttttagatgattgttagatcatgggagtcagaacagtaatatgcataaatttacaaatatttttctgtaaataaaaatcgctctagagaaactctagaacgatttttggacatacttgatcttagtatctattattacttagcgtaatcatcaatacccaagtgctccaaaataagtgcggcagtttcttcaatggagcggtgagcaacattaattacatagcaacctaatttcttataaagtgcttgtgctgattcaagctccttgttgattgaatccatattagaataagtagtatcaggattcaaaccataagcgatcattctttgacgtctgatttcgttcaatacagatggatcgttagtcaagccaataatcttcttaggatcaatttcgtagatttcttttggaatgtgagtttcaggaacaagtggtaaattagctacctttaagttcttattggctaagaacaaagaaagtggagtcttagaagttcttgataccccaagtaaaacaacgtcagcttccaagaaaccttttggatctttaccatcatcatacattacagcgaattccattgcggaaattctgtcaaagtacttttgatttaagctatgctgtgcaccaattttttgatctggtgtcatatgagtagtttgttgaattgcttcaactacaggtgagaagatgtcaacacattcaacattatgctcacgggcaaatttgataactggcatttgcatttcatctttaaccaaactgtagataattaccaagtttggatatttttcaatttctgttaaaacttcgtccaacttcttttggttagtgataaaggggtaacgacgatagttgatattgcagttaggaaattctgcagctgcagctgtggcgttactaaaagcagtgtcaccagccgcatcagaaataataataatgtttaattcattttggtcttttgtttctaccatattaagctcctcgtgtattattaaatatctttctgaaaataattatactattaatgaaagcggattaacaataaaaactcagctcttttattaaggtaaagtagtcggtttacttaacttaaaaatttatcaaaaagtttttgaattgtattgaccctaaagattagtttggtataatttaagtaaatgtatggcgtaacgccaagaaatggaaggagggatcacacatggctaagacaatcgttcacgaaaacgagtctattgatgatgctcttcgtcgtttcaagcgttccgtttcaagaagtggtaccttacaagaataccgcaagcgcgaattctacgaaaaacctagtgttcgtagaaagttgaagtctgaagctgcacgtaagcgtagacattattaataaactactgagaaagctacctgtttttgggtagcttttctttttgacttcttgaagcataattttgattatgttaagtaaatatttgttagttttattttagttaagaacatagtttgttataatactattgggtttttaatagaaagaaggatattaaatgagtttgtcagatcaaatcatggctgatatgaaatcagctatgaagaatcacgacaagacaactcttaatactgtccggatgatcaaatcggccttaatgaatgaaaaaattaaagcaggacacgatttaactccagatgaagaattaactgttcttaatcgtgaaaagaagcaaagagaagaatcgattgacgaatttattaaggctaatcgtgatgatttagctgaagaaaccaaaaaagaattagcagttgtagaaaagtacatgcctaagcaaatgaatcaggatgaacttagagcagctgttaaggaaacaattgatgaagttggtgctaaaggtaagtccgactttggtaaggtaatgaaagctttaatgccaaagattaagggacgtgccgatggcaaggctgcttcgcaatcagttcgtgatcagctaaattagtagtaacaagaaggagcgggtctatttggctcaaacaacttttacacctcaaagaccagaaaatattcaaaaactagttggagttaatgacggaaatttaaagcttctttctgaaggttatgatatttctgtgtcagatgtcggtaatgagattgtcattgcaggagacgatgaagagaagatcaagaaggtagttgctgttctaaaggcactcgatagtgttgtgaatactggtgttaacatcggtgcgcccgacacagtaagtgcgatgaagatggctgacaagggtaccacagagtactttgcagacctatataaaaaggttttgattagggatgctaaaggtagacctatcagagtcaagaatatgggacaaaagcgttatgtcgaagctattgataaatctgatgttgtctttggaataggaccagctggaacggggaaaacattcttagccgtagtttgtgcaattgccgcctttaagaagggagaagtttctcgaatcattttgactaggccagctgttgaagctggtgaatcacttggatttttacctggtgacttgaaagaaaaagtggatccatatttgagaccaatttatgactccttgtatgctattcttgggactaatacgactgaccgtttgatggaacgaggcgtaattgaagttgctccacttgcttatatgcgtggacgaactttagatgacgcttttgtaattcttgatgaagcccagaacactacagatgcccagatgaagatgtttttaactagacttggatttaattctaagatggtcgtaaacggtgatatgacacaggtcgatttacctggtcgacagcatagcgggttaattgatgctagacatatcttgaagaatatcgaccaaattaaatttatcaacttttctgctaatgatgttgttcgtcaccctgtagttgcgaaaattattactgcttatgaaaaagaggacattaaacactaaaaatggatccaattgatattacttataatgatgaagttggctttttagatgatgaaaagcgtaactggcaagactggattatgaaacttttgctgctagctaagaaggaaattggcaaagataacaacttagagatgagtattaactttgttgacgaagatcgtagtcatgaaattaatttaaagtatcgtgacaaagaccgtcctactgatgtaatttcctttgcaattgaagatggtgaggattcaattgatcttgcagcatttgcagatgatccagactttcaagaggatatcggtgatctatttatgtgtcctagtgtgattaagcgtcacagtaaagagtatggtacaggttttgatcgagaatttggatatacaatagtccatggctttttacatttaaacggctacgaccacattaagccggatgaggccaaagaaatgtttggtattcaaggaaaagtgttagaagattatggtttgccattgtatcctgatcaattagatgaaggcagaggtaaataatggaagaaaaagagtttaagtctggctttgttgctttagttggtcgtcccaatgttggaaaatcaactttaatgaactatttagttggtcaaaaagttgccattacgtctaataaaccacaaacgactcgtaatcgcatttcgggtatttatacttcagatgaaatgcaagttgtttttgtagatacgccaggtatttttaagcctcattcaaaacttgacgactatatggataaggctagtgtatctagtttgaatgacgttgatttagttttattcatggttgaacctgaggaaatgggtaagggcgatcaatacattgccaacttgttaaaagaagtaaaagttcctgttcttttagtaattaataaagttgatgaaattcatcctaataagcttttgccaattatggattcatatcacaaacttgagggctttaaagaaatactaccgatttctgctactcaaggaattgggattgaagatctgcttaaaacgattaaggaatatttgccagtaggcccacaatattatggtgctgatcagatcacagatcggcctgaatattttgtggtagccgagttaattcgtgaacaaattctgcgactgacttcacaagaagtaccacatgctactgctgtcgcagttgatcatatgaatactcatcaaaatggcaagctcttgattgaagcgactatctatgttgagaaagacggtcaaaaaggcattattattggtaagggcggtaagatgctcaagcagattgggattaattcacgtcaagagattgaaagattgcttggtgaaaaggtcaacttgcgtctctgggttaaggtccaacataactggcgttctgaccctaactttttaaagcgaataggctatgacaaaaaagaactttagttgaattactgttgtataagcgttgtcgaaagatgacgtcttttttgtatgtttagggagacaagaaaattctattcgttggataactaatgggataaaaatagatacaatagtaatgacaaagtgatgaaattttgggatctattgttttgtgattgttgttatattgggatttgtttactgtattctccacgtatgtggaggctgaaacagcagtctttttgtactatagactatttatgatattatgatatcttcatcagaatatctataaaaaatgaattttaaatactaaaggagtcatgatatggcacgtgaactaaaagaagttcagggtattatctttaaaaggcagaaatataaagaagcagatttattagccaaaattatgactaaacaagatgggattatgactctgattgttaaaggagccctgaggcctaaatcaagattaagtgcagcaacattaaatttttctattggtacttacgtaatttatacgagcgaaaagggcttaagtaatttacgcacatataaaggggcaaggcagtttgatggcttatataatgatttaaccaagaacgcttatatttcttttatttttgatttaattgatcacgcctttgtagaatatcagccaattggtaaatattatgatttagctttatttgctttgaaaaaaatagatagtggcgttgatgcagaaatgattacacaaattgtgcagatgaaaatattagcagcatatggtgttgagccacagctaaagcattgtgttatttgtggtaaggaaaaaggcgtttttgattattcgattaaaatgggtggagttatttgtagcgatcattttagtacagttactagccgaatgcatttaaagccaaaagaaactgctgtaattagaacaattggcttattaccgattgagcgattaggcgatattaaaattaatgaagaaacgaagagggctactagaaaagcgattgatcgtatttaccatgaaacgataggcctaaatttaaagactaagaaatttttagatgaattaaaactttttagttagtaaaaatctggttttaccatgacccatgtgttaaaataaaaacgtatttgacgatgatgaggatttaagaaaagtactagttcagcgaatgtcggtcggtgtgaggacatctaggaaaaggcacctctagtcatattgttcaattaagagcaggaaggatacttcctgaattagggtggaaccgcgataatatttcgtccctatgcaaaattttgcataggctttttttatggcctagcgcaggaggagattaaaggaaatggcagataagaaattaaatattcagaatatgatctttaagctggaacaattctggtcctccaaaggttgtatgattatgccttcatacgatgttgaaaagggtgcgggtacaatgagtccttacacttttcttcgtgcagttggtccagaaccatgggcagcttgttatgtagagccttctagaagacctgcagatggtcgttatggtgaaaaccctaatcggttattccaacaccaccaattccaagttgttattaagccagctcctaaggatattcaacaatattacctagacagtttgaaagttttaggtatcgatcctttggaacacgatattcgtttcgttgaagataactgggctaacccatctatgggttgtgctggtgttggttgggaagtatggcttgacggtatggaagttagccaattcacatacttccaagttgttggtgaattagatgttaagccaactatgagtgaaatcacttacggtgttgaacgccttgcgtcatatattcaggatgttaactcagtatttgatcttgaatggggtaatggcattctttatcgtgatatcttcaagcaaccagaatatgaacattctaaatatgcatttgaagaatcaaatcaagaacaattgcttcaattctttgatatttatgaagcaactgctaagcgtttattggataagaacttggttcacccagcatatgattacattttgaagtgttcacatacttttaacttgcttgatgctcgtggtgctgtttcagttactgaacgtgctggttatttatcaagaattagaaatcttgcgcatgaagttgctgtcaaatttgtcgaagaacgtgaaaaacgtggcttcccattgcttaaaagtgcagaagacaaaaaggcgggggtagaaaatggctaaagattatttatttgaaattggtactgaagaaatgccagctcacgttgtaccacgcagcgttaagcaattagctgacagaacaagaaaatttttaaaagaaaatggcttgaaatttaaagatattaagactttttcaactccacgtcgtttgactattttggttgaagatttggctgaaaagcaagacgatattgatgaagttaaaaaaggtccagctaagaagattgctcaagatcaagatggtaattggactaaggctgctcaaggatttgctcgtggccaaggaatgactacagacgatatctattttgaagaacttaagggtactgaatacgcttatgttcacgttcaaaaggaaggtaagaaagctagtgatatcttacttggtatgagcgatatcattaaggcgatgactttccctactaagatgcgttgggattcaaatgattttgagtttgttcgtccaattcactggcttgtttcattatttggcagtgatgtaattcccgttaagattttggatattactgcaggtcgtaaaactcaaggccatcgtttcttaggcgattcagttgttttggccaatgctgatgactatgaagatgcattaaaagatcaatttgtaattgctgatgcagatgaacgtaaagatatgatcgttcgtcaaatgaatgaattagttaagaagaacaactggcaagttaaaccagatcgtgatttactagaagaagttacttatttagtagaatatccgactgtatttgctggttcatttgatgaaaagtatttgaagattcctgatgaagtgctgattacttcaatgaaagacaatcaaagatactttgaagtctatgatgaaactggtaagttaattaatcactttattgctgttcgtaacggaaataaagattaccttgataatgttatttcaggtaatgaaaaagttttagttgctcgtttggacgatgctcaattcttctatgatgaagaccgcaagtatccacttagtcattttgttgatcgtcttaagaatgtttcattccacgataagattggttcaatggctgaaaagatgcaacgtgttcgcatgattggtgattacttagctaagcgttgggatttaccagagaatgtagtcaaggatttcgaccgtgctagtgaactttacaagtttgacttagttacccaaatggttggtgagtttgcagaacttcaaggtgtaatgggcatgcattatgctcgtcttgcaggtgaggacgaagaagtttcagttgcaatcaaggaacactacatgcctgccactgctgaaggtccacttcctgaaactacggttggttcattattatcaattgctgataaaattgatacaattgtaaccttctttggtgcaggaatgattcctacatcatctaatgacccatacgcacttcgtcgttatgcatatggtattgtaagaatcttacttaatgagaagtggtcattaccatttaacgaagttttaccagaaatcattagtatgcttaatggtgtaactccagctaagctacctaagagtgatgctgaccaggaaattgcagacttcattcgtgatcgtgtcaagcaatacttacaaaagaatgacttcaagtatgatattattgatgctgttcttgcttcaagtcaacaagatccaagtcaaattttagcagcagctactgtattgcaacttcaccatgatgatgaagaattcaagccagtagttgagagtttgactagaattgataacatcttaaagaaggctaaatttaagagtaatactgctgttgatgaaagtctctttgatgataacagtgaaaaagaactttacgctggcgttcaaaacttgcaagatattgaaagtttggctgatctctaccaaggttttgttcaactgcaaccagtgattgatcaatactttgaaactaatatgatcatggctaaggacgaaaaggtcaagaataaccgattagcacaattatatgcagttaatgaattagcagatcgtttaggtgacttaagcaagttagttattaagtagttaatttagatagaaaaagggtgattcatatggctggacggattcctgaagattttatttcagaggttcgcagtaacgtcaatattgttgatgttatcagtcagtacgtttcgcttgagaaaaaaggcaaagactatattggtctttgcccttttcatcaagaaaaaactccgtcgtttactgtaaatgctgataagcagttttttaagtgctttggttgtggtaagggtggaaatgtttttaaattcttgatgtataaggatgatttaacttttcccgaaagcgtcgagcgagtagctgagtttgcccatattgctatgcctaatggatatggtcataatagtggcaccaaattaaatccacttatgcaaatgcatcaggatgccgttgatttttatcatcgtgtgcttttgactactaaagccggtgaacgggggatgcagtatgctcaaaagcgagaactagatcaagaaatattagaccattttaagataggctatgcacctaaggctgataatgttttgattacttatttacgtagtaaaggttatcaagatgatgatctagcacaaagtggtttatttgttcaagctagggatgggcagttatacgaccgttttcgtgaccgtttgatgtttccattggataatgaaaatgggagaacgataggcttttctggtagacgaatttctgatgataagaccgaagctaagtatatgaatagtcctgaaacggggatttttaccaagtcaaaggtattattccactttgcagaagcaaagaaagcagctcgtggtgaaggtcacttagttctatatgaaggttatatggatgtaattgcagcatataaagcaggggtgaaatcgggaattgcctcaatgggaactagtttaacagatgaccaaatatatttgttgagacgtattactcctaatatcattattaattatgatggagatgatccaggagtccatgccgaagaacgtgctgcacgtatgtttaataaagatggcaattttaatttaggaattgtagttttaccagaaaaactagatcctgatgaatacgtcaaaaaatatggcgctgagaagtatctggaagaagtcaaaggtgccttaacgccgactgactttttcttaaaacggttggaacaaaaatataacttagataatgaccgtgaaaagattgcttatttaggtgaggccgtaaaagaaattgcacaagtgcgcaatccagttgagcaagatatgtatactgaaaaattggcgaagtctagtggggtttctattgcttcgttaaaggcaaatcttgctaaagaaagacggcgaaataatcgggcacgcaatcatgtacgtaattctcaaagaaattcacctgattatccgatagacgtacctttacctggtgatgaagacgtgcctacagagcagtcagtagttgaaaaaaatcctagtcagaccagactcttgtatttatttattcattcaactgatgctcaaaaatatatgttagaagggcaatttcattttcctaatcaggattttgaaactctggcacaggattggttaaaatatgcggaaactcatgaaaatccacaaattgatgggttcttagattttattcctgagcaacttcaaggtataatagtagatgctgaaatggcacagatgccaaaagattctacaattcaagaagttgatgctttggttctagcattaaaaagacgcaacatctattccaggctgaatgagcttcaagctcaattacaggatgctaagcgcaaaaatgatgcacaaggaattattgcaatcactcaggagattattggattaaaacggatcttaggttaataaggaggctttttagtggcagaaaaagaaactacacaaaaactatctttggataagatggttaagcaagtcgtaaaagacgtaaagaaagataagtcgatcactgaagaagatttcactgctcgtttgattaagccttataacttacaaggcaaggctgtagatcaactagtacaagagtttgaagataatggtattagcattgttgatgaaaacggtgatccttcaaagttagccttaaagaaacaaaaggatgttgaaaaggctgaattaaaggatatgtctgctccatcaagcgtacgcatgaacgatccagtgcggatgtatttgaaggaaattggtcgtgtaccacttcttactgctgatcaagaaattgctcttgccaaaagaattgaatccggggatgaagaggcaaagcaagaattagccgaagccaaccttcgtttggtagtttctattgctaagcgttatgtaggacgtggtatgtcattccttgatttgattcaagaaggtaatatgggactaatgaaagctgttgataagtttgattatcgtctaggctttaagttctcaacctacgcaacttggtggattagacaggcaattactcgtgcgatcgctgaccaagcacgtacaattagaattcctgttcacatggtcgaaacaattaataaattgatcaggatacaacgtcaattgttacaggacttaggccgtgaacctacaccagaagaaattggtgcagaaatgaatatgccaaccaataaagtacgtgatattctaaaaattgctcaagaacctgtttcattagaaacacctattggcgaagaggatgattcacacttaggcgactttattgaggataaggatgcaactagtccagaacaacacgcttcttacgaaatgttgaaggaacaacttgaacaagtacttgagactttaactgatcgtgaggaaaatgttttgcgtttgcgttttggtcttgatgatggtcgtacccgtactttggaagaagtaggcaaggtatttggtgttaccagagaacgtattcgtcagattgaagctaaggcattacgtaagttgcgtcatccaagtcgctcaaatcaattacgtgatttcatggattaattataattatctatattaaaagagctaagtttgatacaatcccactaaagtggacgattgaaatacataaagtattcaattatccatggaggtgggattttttatgtccagaaaaagtaaatattcattcgatcaaaagatatgggcagttgaacaatacttgaatggtaataggagcagcgttgaaatagctaaacggcttaagatgccaagtaaaagtggagcgatgcaagtaagaagatgggttcatcaatatcaaagcaatcgtgatacccttctaagtaatgctcaatacaataatcattactctaaggcatttaaagaaaaggttgttcaagaatatttagctggcaaaatgtcgttaccttctttagctaataaatatggcattagaagcaatggaacagtatcagaatgggtttccaagtataatagtcatatagaaaatcgggactatgatccccatccggaggtctatatgactaaagcaagaagaaaaactacccagcaagaaagaattcagattgttcaatactgtcttaatcacgacaagaattacactcaaacagctgtcaaatttgattgttcttaccagcaggtttacagctggacacacaaatatctagctaatggtgaaacaggattaacagataaacgaggcagacataagaagccagaagagctaactgagttagaactggctaatcgaaaaattaaggaattagagcgtcagctcaaagaagaacaaactaagaacgaattcctaaaaaaattagatcagttagaaaggatgtgcttgccggacaaccaagatacagacaagccgcaataaaaagacgctggaaacaagaaacatatcagttaatccatgactgccatcaaaagtacaattggaagattgatttaatgtgcaaatgggctaaaatagcacgctcagcttattacaaatactttgatcctaagcgcaagccgagtaagcgtgaagaacgagacaaaaagattgaagcaaagatcattgaaataaccaagtctaacaacagtctgtttgggacggaaaagatgaccatggcagttaatcgacagatgtctgatgaaaagccggtttatcataaaactgtttaccgcttgatgtgtatcaatggcattagatcacaaaagcctagataccagaagctaaagttcaagcatacaacgcctgagaaaacggccgaaaacaagttaaaaagagactttaatgcatctagacctaatgaaaaatggtgtacagatatcactgaagtcgttgctgctaacctgcctaaggcatatctatgtactgtgtttgatctatatgatcgctatcctgttggctacgcaattagtaaacgaaacgatactgctttagttcaagcagcctataagcaggctgttaaagcataccctaatgctcatccgcttttccatagtgatcgtggttttcaatttactcgcgcacctttccaaaaccaattagaagaccaaggcatgacgcaatcaatgtctcgtgttggctgctgtattgataatggtccaatggaaggctggcaaggcattatcaaagaaatgcgagttattcttcatcctcaagtggccagttatgatgaacttaatgattctatttgtaagacaatagattactacattaatgaagatccacagaaacgttttaacggtttaactgctggtgaaatgcgcaaagaagcgatgaaaggcaatattaagaattgccctattgcaccaaatcatcgaattgagaaatactggcaaaaaatacacgaaaagaaaataagagaagccaaaaaatcctcagctgattattaatcaactgaggaataaaagctttatgtaattctactgtctacttgacagggaatgtatcaattttgcagatcttttttattggactggatctttacctgctgcccttagattatcttcaatgattttcattggatttaaccaagtgccattatctttccaatagtatttgcatggcgtattgtcatgctttttatcaatgtaatctttatctgtcttagtaactcctaaatgaatgtgagagccggtcagtttaccaattttttgtcccaacttgactttttgaccttttttaacataaatatcagtaatactgaggaagccttcctggtaaacttcaacatagccatcatcggaaataatccaaatataaagtcctaaacctggggcgtatttaacacgatggacagttcctgcatgcacagcatatacggaagaatgtccaacttcactaaatccgaagtcatagccatcatgaaaataactcttgctaggatagactcgacgaatgacgtcagtttcaccaaacttttgtccagatttaaatttgattttcttttcatagagcttcttaaaagggtaaccccaagtaagatgaacgacttttttctttttagcagtcttctttttcttaaccgtgtgagtttgtggtcgtaaactattcagattgttttgccataagggaatagaggcaaaagctaaaatagcaattaaagcagctaaaagtgcaaacttactttcagtttttttcattaaaatagctcatctcgctttccgtcaagcatatgttcactaattgtttgttcaaaaaatactggtaaatcatgatcaaaattgtaagctaacttttgctttttcaattctttagcactcatccaggttagtttaccttcgtctgattctttaacggtacccgaaaattgttcagctatgtagaaaaatactaaataacgttcatcattgtgatcataaaattgtttaacaccaactaattgaggatgactaatcgttaatccagtttcttctttgacttccctgacgacagaatcatgaaaagattcatgcgcttcaacatgaccaccaggaaaagtaagtcctggccagaccggatcgttgcgatcaagaactaaaacctgatctttgtttttaaccatgcacatattagttaatgtgacattttctgttctactcatgtaaaaaacccgctttctgtgacgattatatcaaatagtagcaaaataagactatgaaatatgctaaaatttggttaaccatatcttttatggaggaaacatgaatttaagattaaatacgttggcaaagatggtagatcctggcagtcgagtggctgatattggaactgatcatgcatacttgccaattgaattagtaaaaaatggcaaaattgattatgcaattgctagtgacgttgcagagggccctcttgaaaatgctaaaaatgatattgcagcagctgggttaaccgagcaaattgaaactcgcttaggtagtgggttagaaaccgttactcatgctgatcagattgatacagttgtgattgccggaatgggcggcaagttaatgactgatattcttgatagagcttggagcaaagatgcacaatttaaaactctggtactagaacctaatataggcgaagcaggggtacgtaattggctgatgatgcataattataagattatctcagaaaaattaattgcagaggctgggcatacttatgaattaattaaggctagcttaactgaagaaaagcatgagatgactgaaaaggaaatcttttttggcccctttattgtacaagaaaagaatccagttttttatcagaaatgggaaggccaactcgcttattatcaaagattcctggttaatttgaataaagcaagaaaaaaagacgaagatcgaatcaatgaagtagatcatgatattaaattaatcaaggaggaattggagaaatgaccaaagtaaaagacattgttgcgcgtttgcgacaagattttccggaaaacattgcttcacaaggtgatcctgttggtatgcaaattggatcaatggaggctgatgttaccaaagtaatgactactttagatgtacgtccccaggtagttgaagaagctgttgaaaaaggggttgatttcatcgttagtcaccatcctgtaatgtttagaccagcacaaaatttggattttgcgaatgcacaaaacgcaatgtatggcaatattatcaagaatggaattactgtttattcaattcatactaattcagataaagcccaagatggatctgctgattggcaagcagaggaactaggtctgcaagatgttgaaccattttgtctggatgatgatggaattgctatgggtagaaaaggaaagttacctagaacaatgactgcttatgattttgcctattatgttaaagaaaaaatgcaaattaaaatggcacgtctgattactgcaaacaatgaaaagccaattaccagtgtaggatttatttgtggggatggtggtaaatattggactagagccttagatgaccatttagatgcttttattactggggatgtttattatcatgtaggccatgatatgatttcatctggtttaactgttgttgatcctggtcattatactgaaaaactatttaagtacaaggtctatggtcgacttaaaaagtggaatgaagaaaataactggaatgttggaattgagctttccgaggtttctactaatccatttcaagacttattttaattagaaagagagttatatatggaatatcctaatttgttacctagatttttaaagtacgttaaagttaattcgcgttctgacgaacattcagatcgctttccatcaactgaaagagaagaaaacttccaaaagaatgttattatgaaagatttggaagaattaggtttaagtgacattcactacaatcaaaatgctggtagtgtaatcgctgaaattccgtcaaatgttgattatgatgttccagtaatgggctttttagctcatagtgatacggcagactttaattcagaaaatgttaaaccacagattcatgaaaattatgatggcgaaagcaaaattcaattgggagattcagagttttatcttgatcctaaagtttttccacatttgaagaattataaaggacaaacaattattacggcctcaggtgataccttacttggtggggatgacaagtgtggtgtgtcagaattaatgacttttgcggaatatttaatgaatcatccagaaattaagcatggtaagattcgattggcctttactcccgatgaagaaattggtactggtgctgaacactttgatgttgaagactttggtgctgactttgcttttactgttgatggtgaagctcctggtaagttagattgggggtacattctctgcggcacaatttagtcttgatattcagggagttaatgttcacccagctgttgctaaggggcaaatgattaatgcaattcaagttggaattgactttcataatcaactgccagaacacgatcgcccagaacataccgatggacgcgaagttttcttccatctaatgaattttgctggtactgttgataatgctcacttagattacattattcgtgattttgaacgtgatgggcttgaagagcggaagaatttggttaagtcaatcgttaagaaaatgaatgatgaattcggtactgaacgaattacacttaaaatgtgggaccaatattacaacatggccgatgaattaaagaaacatatggacatcgttgacttagcgcgcgatgcttataaagcagaaggtcttgaagtcaatgaagacccggttcgtggtggtacagatggctcacaattgacttatatgggcttaccatgtcctaatatttttgccggagaagaaaacatgcatggtcgttatgaatacacagttcttgagtctatgtggaaagctgttgacgtgatgatcaaaatggctgaattaaatgctgaaagagctaagtaagtgaaacatttttgactaaaaatatcaataattctatttctgatctaatatgagattattgatagattaggaaatagggtaagcatagttaataaataaaaattatgcactaatactattaaaaataaaagatagtttataattaccgtcattataggattatagactatctttttgttgtacttttaacttttatgaacttgtgaaacaaagtgattaaacttagcccttgcaaaaagtgactaaagtaagtattatagttagtgtaatagattaataatacagtacaaaataggagctgagtaaatggaatttaaagataatattcctatttatcttcagattgaacaatacttgtatcgtcaaattgctttaggcaagttaacagctggtgagaagattccttctgttagaaaacttgctctagaattaaccgttaatgttaataccgtgcaaagagcactacaacagatgaacagtcaaggtattctttatactaaacgtggcgaaggtaattttgttactgaagatactaaactattatccgaaaccaagcagtcattaattaataatgaattagaacagtttgttcaaaatatggaagagtttggaataggaaagaacgagttagtttcaacgttagagaattatttaaaaaatggtggggatcagaatgaatgatttattagctattaaagatgtaagttataagaaaaatcagaagcaagtattgcaagatgtgaacttgaatttagctcctggcaagattgttgcgttacttggtgaaaatggtgctggtaagaccactttgatgcgaattattgccggtgtagctaagaattacaaaggcgaaattaatttagagggggcaacaaaagaggcagaaagaaaggctaagttgtcttttactgatggtttaactggcttcagcgattcaacaaagatcaaggaagtggttaaattttacgcaacgatttttcaagattttgatgagaatgaattcgatgagctgcgtaagtttatgaaattagatcctgaaatgaagttgagtcagttatcacgaggaatgcgtgaaaaattgattattgctttaacatttgctcgtaaagcagatttgtatttacttgatgaaccttttggtgggattgatgcaatggctcgaaagaaaattattaattccatcattttgtggaaagatgaaaaggcaacgattttaatctcagatcactttgtcaatgaaatttcatcattgcttgatgaagtggttattgtaaaagatcataccgttttggaacacaagtcagcagatgacattcgtcaaacgcataagtcaatcgaagaatactatgaaagtttttatgcagatgaggatgatgaataatgactagttttaacacattgtttaatcgaatgtttcaagaaaaaagcaagtcagtctatttaatcttcttaattcaagcctttgctagtttatgttttacaattattggttttgtttcggaaaatggtacaccagaatttgttaatggaaaagatactagttctgtcaatgtgattgttgcttttctcgctgtatttgcagtaatgatgctgataacgtcatttatcgctgattttgtttattggattatttcttcaatcaagaatgaaaaaattaatcgcagtcaaacttggcgcttgattccggtaactgatactaagtttttgcttagcaattttgggacagcatttttaacttatatttggttaggaattttagaagcggtcacgataatcgttacccttttgccgatgttgtctgatcaagatgtgcgcaaagcaataggtcaggctagcatccatctttcagcaagagactggcaaacaatgctcggaagtttgctgctaatcatttttattggctatgcttggtacgcaattgtaagtttgcttaacctagcaagccgcagcattattgattttttgccaggtggctcaagtaaagtatggacctttattattagagtaattgtaattattgcgattatttggattttaggccatgcggcaacaattatcttttcagtcttaggaaagtttagtccttttatggtcaacagccaggatattaactatgccactacgattcttcaattcttggtctttgatgttgtgattactttgatcgatatcttgcttttgaataaattcgtagaagcaaaacagaattaggagttttttatggcaaattttaagaccttgtttaagcaaatgtttgtgcaaaaaaggcgctacgctaacttagttttgttattacaagtttttgcagtcctttttttgctggtaatggctctgttagataaaagcaatttagcttatctcaacattagtaaggacagtaattggctagatcgtttgcttagtgcaggaatgctcgaaacgccgattgccgatgtgatttttgttggtctgctttgctggcaaaatgaaaaaatcaacctcagtcaaacttggcagctagctccagcttcaagtgtcaaaatctggctgattaatatgctttctagtttagttgaatgtatttatatttttgtaattcaagtcattttaggcttcgttgctgctatgattgataatttaagtcatcattattcactgcttcatgacttagttgatgctaaagttacttgggcagatgctagtttattaattgaatttctattgttcttaactggaacggttttagttattatgacttttgtcagttttgctaattttttgacgaaagtaattgttgatcaattgccagttaacaataatattgtcattaagttatttgtgatggcagtgattgtgattattgcaatcttgattgctgaacagctaaacgaacaaattactgctatgtatttgcatcgttttgccaaagaagcagcatatgatccattgggtatttcagtggttgagtactttgcaggagcaattgttttaggagcaatcgacagctacttaatgagtaaatttgtcgaacctaagataattaatcgttaattgaaggggaggggtagatagtgacgaatttttggaccttgtttaggcaaatgtggacgcaaaaaagaaaatttatttatttggttttcttaattaatatctttgctgtagtatttttatcaggttattttcttcttttcaaaaattggaatggtctagcaaatctgccgtctaaaaatttagggcaattctggcgcaataattttgtctatgtgactttatacattgattttgccttttgtgcgattacatgttggcaaaatgaaaaaattaatctgagtcaaacctggcatttagcagctagcgatgaacgaaaaacatacttagctaatatatttagcagtttgctggcatgtggttatttcttcttgctgcaagaaatcgttaatagtctgttgctgatccctagttgcggggcagacagttttgctcaagcatttcgtgagtttggtctgtatccaattaaaacagttcccggcgttgaaataactagcaatcgaatgcttgcttttcattggttgtttatcattttgataattttaatcatttacttctttgtcagctttgccaattttagttcgcgagtaattactgatttcttgccgtttaagagtacagtttgggctcgcttgttaattatcgcaattttggtaattgtcgcagcttactgcggcatgatctttatgtctaagttacagggctttgttgataagagtccaaatttacaagcaaccgatccaatctggttagatgatttatgcttgtttattgttagccttgttttcggtattttgaatctagtattcgtgaagaaatatcttgaaccaaaaatagattaattaatgcaaaaaaagagcttcatttcaatcaagaaatgaagctcttttttgtagttaactaagcatttgctgacatgtaatcataaagctgatttacttcttcggctgtgaattgtccatcgccaactttcatggcgtgaactttttcaactgagaggtgactagcaaaggctaggtcagtgtcattaacatggtgttttacttgaaaattgataattgcatcagataattcttcttgctcattcataataatttctccttaccctctaattttaatcaaattggaataaaaaataaaattttttgcaatttcattgattaaaatgttttccattgcgtaaatggccaatacctgaagacgactcggccaactaatgcgctgcgcttaacaaaaccgaagtaacgtgaatctttggaaacatcgcggtgatctcccatgacgaagtaactatccttaggtactcgcttttttaaagtgaaattgttagtatagagttcacctaatttatgtgactttctttggtagccattatttaaatatggttctgcaatttgtttgccgttaatgtaaagcttatcatttttagaagtaaccatatcaccaggtgtaccaataattcgcttgatatacagagcacctttttggtctggtgcttttagaatgacgatatcatttcgtttaggcgtaaaatgacgtacagcaatcaaacgatcgccattctcaaatgtgggctgcattgatggaccagatactgtttcatttgataggaaaaaactaaaaataaagtagtaaattcccatcaaaattgcaaacataataattatgtctaaaacaaagcggccaatgctttcatcatcatttctctttttggtttcaaccatagaatatctcctttgcttgctagtcttattataactgaattctccgccgttgaatggtaaaatcatattaaggtgtttaagtatgacaaaatttttgacgaaattaacaaaattagagcaagagataaatcatactgcggttaaacgacaagttgaagaaatagcattaattgatagttatgtacaagcaggtaagccattgaagcgggcaccacgcagattaggtttattgccagatgaatttgaagaagttttagttgaggtgggaccagataaagaaggggccttaagggatttaaataatttacttaataattttcggcaatatctctctttaatatatggcatctggtctctgcctaatattcagactgcgcagttaattaaaaataagctgcatgtacaaacagcgttagaaatcatggcaggcaacgcgtattggtctcaagctttgactcaggttggaattaaagttcacagtacagactcattagagtgggccaagacgtcgaccactggagctaagcctttttatccagtagaagatttaccagctgaccaagcaattaagaagtatcacacagttaatctagttctatgttcgtggtcaccaaatttcggtcacggagatttagaaactgtggcagcttggcataagtataatccaagttgtcatttgctctttgttggtgaaaaagatggtgctactaattcaccagaattttggcaccaaaattggtttaaaaatagtgcagctttagacgagattaatcattccttgcaaaacttcgattttattaatgaacaggtatttgaaataaaaaatgaattttaaaaagatatttttgttactgattcttttattatcttttttaggaattggaacaatgctctccaatattgaatctaattatgctgacgaattgctggaagcacacggcttaactaataatacccgctattttagaacagatagtgatgataagattagtactttcctaaaatatttggacaaaaattatgcgaatcatcaaattcaactgcatctagataataattatgaaaaaaaacaagtgcttgtttgggctaatcatgccgttactggcttgccaactgagagtggtcgctatttttcgcctgatgattttaaaggacaggtttcttttgtggtgctggggccaacagttaaacttaatttattagatgtgcagaataataaatatgttattttaggcaaaaattattattctgttataggcgaatttaaggactatccacaggtagaaatggataaatattatctaagtacaggaattgatcagccaactgctaaagaccagctcaagaattatcgaattgtagtagatgcaacacctgcagtgattgaaaagattgctaagcattatcatgctagtttgcatattccgtcttttgttcaagagcatcatcgagatcgtttatctgtcgtgccggatattttaatgttagttgtttgcctattggtcggaatgatcacaaatatgttgcttgcaataggaattaagcgtcaggctcgtttaacacgtctacacgatgatttgctgcgcaattgggtaattaaccgcagcgtacgtttatttttaatagaggctatttttgcccttgctacatacttctttttaagatggcatgccttttattcaacatatggttctttaatagttacattaatagcttcctgggttgtaattgtattggcgttttgtgggatggtctattacttagtgagaaaggacaggaaaattgctaaatctaccaaatgaatttaaaactaaatatgaaaaattattaggtaccaaaaaagcacaagaactatttgcggcgatgaatgaagagagcaaaaaagcttttagaattaatacattgaagcctactaaggtttcatatgagcttactgattcagtaccgcaaataaattcagcctattatggtgaagtatcgggggaagatcctgagtgggtaagcggtagtgtttattctcaagatccagcggctatgtttcctgcggcaattagtggtgttcggccaggagagcgcgtgctagatctgtgtgctgcgcctggaggaaaaacaacagcattaggagaacaattgaagggtgagggccttttagtagctaatgaaatctctgcaacacgagtaaaggcactacgggaaaatattgaacgttggggcatcagtaatgccttaattactaatgaaagtccagaaaagttagttccaattttttcggaattttttgatgtgattttagtcgatgctccatgtagtggtgaaggaatgtttagaaaaaatccggaggcaattgattattggtctcaagactatgttttaacatgccagaaccgtcaaaaagagatcctcaatgaagctgttaagatgcttcaacctggcggacgcttaatttattcaacttgtacctttgcaccagaagaggatgagcagattgttagctggttaaataaagaatatggttttacaattttagatacagggatacaaactaataagattgatgttggacagcctgagtgggctgatggaaatcctgatttgactaaaacattacgcttttggcctcaagatggtataggtgaaggacaatttgtggcagttttacaaaaagtaggtaaagctagaattgaaaaaaagagcaaaaacaaaaaagccaagcgtgatccgtggcgcttaaccaaaaatgatcaggaactagttggtcaggtaatggatcagtttaatttaccagttgctttaagtgactggcgtaataaagcaaaagtccgtaatgaacatgtctatattcctgcaatcagtttgcctgaaaaaagtaagcttcatgtaattaataatggagtcgagttgggtatattaaagaaaaaacgttttgaaccaggacatcaattggcagaagtgctaggtaaggtaaagcaagaacgggtttatgatttaccgacaattgaagaataccaaaattatttgcacggtgaaaccgttaaagtggacagtgatttgcggggctttgtgttagtcagctatcaaaaattaatatttagttttggcaaaatcgctggtaatcaagtattgaagaacttttacccaaagggattgagaaaatgataaaactaattgcgacagatatggacggaacctggttaactgaccagaaagactatgataaagaattatttttgcgtgaatttgcggaaatgcaaaagcaggggattaaatttgtagttgctagtggcaatcaatatgctaacttaatgactcgttttcctgaggttttggataaaatttattttgtagctgaaaatggggcattagttgctcaaggaagacaaattttgcatgttgactcgttaagtgatgacatatatcaaactttattaaaaataactactgaatatccatatccagctgtagtgatggggctagtaagtgcttatgttaaaaagagcagtggacgagcttataaacaagaaatgaaaaaatacatggagcatattactgtagtagattcttttggagaaattgatgatcagattttcaaggtcagtctgacagtgccagaagataaaatgtctaaaattttgcgcgaattaaaagaaaaatatccggaggttggttttgtttctggtgcagcagactcgattgatatgcaaactaagggaatgaataaggcagtaggtctagcatatttgagtcaaaaattagggatcaaatcaagtgagatgatagcttttggcgatagcggtaatgatgtaggaatgctgaaatatgtaggccgtagttttgctactgcaacggcgttgccagaagccaaacaagctgcagggcaaattattggttcaagtaatgaaagtgctgttcaaaaagaaattgctaaattgcttgaaattaaataaggaaaattatgtaaagtaaaagcactagtaatcattaactagtgcttttactttacagtaactgatcgatttgagcctttaatggtaaattatagtatttttttatttgtaccagggatgctaaatcttttttgccgtaaacagcaattaaagcagccaattcatttttccaattagtaattaattgctctaatccagtactaccattttggatgtattcttgtaaaaaaacatttgaaataccaacaaattttcctcctagagctaaaccttttaaaatatctaggggattacgtactccaccagaaacataaaatttaacttgctcttgccatgccatcagagcagtcaccacagtaggtaaacctaaatcttctaagtatgaaacgtcactggcattacgtgcattctcaatctgggcaaagtttgtgccacccgaaccggcgacatcgaagtattcaatgccatttacttttaaaagatgaatacttgtttgatccaatccaaaaccgacttctttaataataatgggcaaatcgatagcggtacgaattgctttaattgaatcaagccaacgaaagtcacgatcaccttcaggcatggcaatttcttgtattgtatttaaatggatctgaagcgcatctgcatttaattcttggataatttgtttaattgcagagattggtgtttctggattaacattaacaattagtacaccatctggatcttctgctctggcaaccataaaactgtctagttgatcagtttccttagctaaaatgctggcagatcccaaagctagggcaatattttgctgctgggcaacctgtcccaatgcttgattaatttgtttagaagcagctgagccaccagtcatagcattgataaaaaaaggcgcagaaacatttttgccaaacatttctgatcccagaatagttggatcgacttttgtttcaggcagagcagggcgcaacaaatgcagttgatcaaaactattatatttttctttattaaaaaacatctgagctaacttcagatgttcttcttttctttcagatctaatcgacatagaactctccatcaatgagccatgataatctggtgaaccttaaaattaagaggcataattccattatggcgccattcgctttcaagtgcttcaacatcggtattagcatctgtaatcacaatgccacagtcaccattaccagcaccagaagttttagcagctccaccaaaattttctgcaattttgattaattgcgataaacgtggaatttcaatggcaatttggttaattttggcaaagtgctgcaacaatttacggttagcccgaatttgttgtttgattaaagcaatattgtttgcttcgaaaccttgaaccatctttaaaacacaagctctagaagctgctaagaaatttttatattccatattcaaagccgccttattagcgttagtttcatcaacgaggcgtgaagttgatgctggcttttgactccaaccaatcatcagtttcatatctttaggaggagttagtaattcaacttttaagccaggccaagcttcattaacgacttgaactaaagtcttattagctaattcttgctttaaccattttttgtcaaaagtttggtaagctaaccagccgccatagacactagctgcaatgtcaccagctgagccatttccttgaactgaatagtgtgaaatagccgataatttataaaccagttcattgctcatttttacgccataaaaacgcaagatagctttaactgtagctactgtgacggctgcacttgaacctaaaccatattttttaccatctgcagaatctaagtctgaattgacgtgtaaatcatagactttcatcttgatattttgctcaatacaatattgttcagtaaatgaaatagctgacaaaatatattcaaaagggttgtcacgattatcgattaccatttttgagccctgacgaacccaatgaatcgaatcctgtgagtattgcttggagtgaattaagccagttgcccctttactcttagtgattgacacacgtacaaattggttaactgctactaaaatagcaggacaatcttgctctaatactgcatattctccggcaatatataactttccgggcgctttttctgttatcaaaagaactaaatcctcgaatctaattaacttttttaattacaactagtccaaataagtaattccaggaccaaaacttgcattcactatattaacattattaaattcggacgaaaagcgttgaatgatatctttgctatttcttaattggcaaagtaccttaatatttggtcctgcatcaattgtatagtaacattcaattccttcagtacgaagttgttcaactaatttaatagcttgaatggtttgcggctcaaagtaagtgaattcaggctgtgcagttaaattaattgcatgcatttcatttgcatttaactcagctaactggcctagggcagtgaaatcattactttttatagctttgatcatttcatttaattctgaattgttgcgttcaagccagggcctgaaaaatggagaagattgggcatctttcataccataagtcgaagaaatctttttttgtttggtatttaattcaactgctaaaaggtgaagatccatcgttggtgtttcatctagtgcatatgcgtaagatgtttcgtcgctattacctttttgccaaacagcaaaaccgccataaacggagcggctggcagaaccagatccaatcctggctaaacgagataaatcttctagatcaatgttgatgtcatagcattgacaaaaagcagcagctagtgccgcaaaagcagaactagatgatgctaatcctgcagaagtagggacgtgattgacagatttaacgattaaattgccagtgacgtgaaaacgagcctgcaatttttttagataagcaaaaacacgttgactagctgcagcagtttgctgttgattatttaagaaaaattgattttcaccatctgttttttcaacgctagtatcagtataaaaagcatctaaagtcattgataaactagacattaaaggaagacgtaatttgtcgtcagctttgccccagtacttgattaaagcaatgtttgtatgtgctcgtgcggttctattcattaaatctcctcaatccagtagtcactaattaaatctttacatttagaggcaatttcttgggcgacagtttcgttatcgcacaaggaaatagtaatgccgccaagacctccgcctgataatttaaagcctaaagcgttatttgacaaggcaattttttgcagttggtcaattttatttgttgaaagatcaaatgagtgcaaaatttcttgtgcttcattaaaaatctgtccaactgcttgacgatcgtgcttgatccaagcttttttagtaagatccgctaattcacccaagcgagctatttttttcttggcatagtcggacttttcaagcatttttttaactaaaaaaacagcttcctttgtattgcctagttgaccagtatccatgattaacagggtagctcctaatttggtttgtaatattttaggccccatttttttattaaaaaaaactagataatctgaattaacagtggctgcatcaagaccagaagctttaccatgattgatcatttcagcatgattagttacagtcataatttctttttcagtcatattcagctgaaagaattggttcattgccctagtggtacctaatgcaacagtagcacttgaaccaaaaccacgttccattggaatttcaccagtgtatgtaattttaagtggatggttattgccagccttttttttcatatgtttaactacgtattttaggccatcatattctgccggtgcttcaaataatggaccgtggtagcgagcggtatccatccacatttgagaagcagattcaacagtagttttaatgtgtaaagccttaattggcatagctaaagcatcatatccataaactactgaatgctccccaataataattaccttgccatgagctaaatagctgcttttcatttttaatcatccttaaactagatttatacaaaagattgcccttgctatgataaaataaaaagcaaggagtgcgaacaaatgatcaaaattcttacaggacgacaaaccgacccattacaagaaaaaattctggaagaagcagttgaaaactatcagcaacacccagaacaagaaacttttatcatcgttcctaatcatattaagtttaccacagaagttagggcaattaacaaattagcaacaagcaaacaacaaactgagactgcagttaaaaatttgcatgttttgtctttttcgcgtttagcttggtttttcttaaaagatgccgagcaaggattgcctaatcaactagatgatgcagctagtgcaatgctcttagctcatattattgagaacaaaaaagatgaattgactatttttgaaaatgttaatgttaattctggattagtaaatcagctttatcagacaattttgcaagtctatgacggaaatttagatttagacgagatatcagaggataatttagatcaagaaactaaaaataaattacatgatttgcggattatctatgatgcctttattaaagaaattgcgggtaaattctctactaagaatgaggttcagctgcaactaaatgaaattttagctaaaagtaaaaatttaaagcaagccagtttttatttctgtgatttttcacatttttcattacaggaaacactaacgattaaaattttgatgcgtaaagcaaaagatgtaatccttgcatttaaaacgcgcttaggtgaaattaattctagtgcggaagaaggagattatgattatgtaatccagcaaactattaagcgcttaacgctgttcttacaagagagaaagatggactacgtgacagcaacttttccgcttaattcgcaatcaaatggtcgtgaaatattaaatagtctttggacggagacaattcctaaagttgacgaattgaagcaggtacaattagttaaagcagactctcgatatgcagaggcttattttgtagcgcggactatttatcaacaggtagcactaagcaactatcgctatcatgattttttgattttagctccaaatttaaaggaatacgagacttatttgacgccaattttacgtcaaaatcagattccattttttaatgatttacaacaggaaatgaagtatcatcctctggttgttttaattgaaagcttatttaacttacatgagaatccgtttcaaacacaaaatatgctagccatcctaaagacacacttgttaataccttcttggtataaggaagaggcggagtatattcatgatgttgatgaactagagaattttgttctggctcatggtattaatcataatttatggaaaaaacactttgataattttgtgaatgctgaagtgatccgcttagacaaaatggatgatgaagtagctaagatcgatcgtttgcgcagctacttggttgataagatttcaacatttttcaaaataatagagcaagaaaaagatagtcaaaaggcgttaacgatattttttgagttcttaactaagaacggaattgccgaccgattagaaaaatggcgtgatgaggccaatgaagccggtgatttacagcaggcgcagcaaccagagcaattatgggatttattaatgcagctgttgcaagactatttagcaattaatcctgaaacttttgatttaaatgaattctttaatatgttaattagcgctttccgagaagcaaatttttcccaaattccttcaacacttgatgcggtaaacctttctgaaatggggatggtacaaactagcggctataagcaagtgtttatcattggcgctactgctaataatttaccccaaattcagaaaatgccaggttttttaactactgaaaacttgaatcagctacaaaatagttttaattcagaatcttacttagaagatagtcaacagcttaataacttagaccaaaattatcagtttggtttgtcgctagctttagcacaagatagggtatatgtatcttatccagtacttaatgcttcaaatgaagagcttgatccttcaatttattatcaacgtttaaaggattatggtgctcagcaatttgttcaacatgatttgccagaaaagatgcaggatcttttgtctttcattactaaccctgatgcaagtttaggctatttaacctatatgaattcaataaattcaggtcttgctgtgcaagagttattaaaaatcacacaggagcaactacctcaaaaaacgaagacagtgcttgaagcaagtgattttgataaccagccagaaaatattggtcaggacttggctagtcaattgtatggtcaaaacttgaattcatctgtgtcacaactggaaactttttatgaaaattcatatgaatatttcttgaattatgggcttaagctgcggcgacggtttgaaaatgaatttgatgttattcaggctggaaactattttcacgagacttttgaccgtttagtgaaaaaactaaacaagcagcataccgacttagcagatttaagcagcatagaactggaacaaatgcttaattcggtgcgaaatgtgatgaaggatgaaggaaaatattctcaattaatgaatgatccttttaatcaatatcttttcaagtgtctagaccatactacttctaaggtagctcataattggcggcgctccttgaaggaaaccccgttacgggctaagtattctgaattaagttttgggttaggtgaaaaaatcaaaggattaagcttaaaagtgccagatatatcaggtcaacataaagttgatttgcgcggtaaaatggaccgggttgatttggccaatttcaatgataaggatcaagttttagcccaggttattgattacaagtcatcagctaaaaaatttgatcttgggatgttttataacggaattgctttacagatggtttcttatttggatgttttgactaaaaatgatcaattttttgctggaaaagatcgtctttcattattgggtgctttttatcaaactgttactagacaattagaacgtttgaatagcaataaactaattgatagtagtttaaatttgaaaaagggagcaactgatagtaagcccaagctgatgtatactggcttaatcagcaatgatccagaaatcttagtagaagctgagccattacttgatgatcatcctagctattcttctgaactgtatactggggttaaaactaaggctagaggtggctttagcttgccacgtgaccgcaactttagtgaggaagaaattgaattactgctagaatacgatgagtatcttattcgacaagcatcaagccaaattttatctggaaaaattgaacttaatccatatcgttatggcaaagcgaagaatgccttaacttattctgattatcgtgatgtcttcttttttgatgcgatgctgcgtcaaaatcaatatcatgaaataaacaatctgaataaaaaagaattaattcttaaaatcaaagagaaattaggaaaggaacaataaaattgtctcaatttactaaagagcaacaacaagcaattgatgatcgtggtcatgatattctggtttctgcttctgcgggtagtggtaagacaactgttcttgttgagcgcgttttaagggagattctttcgggaacccaagttgatgaattattagtaattacatttaccaaagcagcagctgaagaaatgaaaactagaattaaacaggcattatcagctgaattagcaaagccgggatctaatcgcagatatttacgtgagcagctaaatcaagtggatactgctaatatttctacaattgatgcattttgtctagaagtaatccatcgcttttattactctgtaaacttagatccaagttttagtattctaactgatgatactcaagctgcattgttaaaagaacgtgcattacgtgaaattgaaggggagtttctagaaaagaaagacgtaaattttaggcatttttatgataactttgcaggggatagagatgcggatagtccgcgcgacttgttgctggatttgtatgattttgccatggccaaacctgagtatcgctcatggttaaaaaaattggttgatgtttacgtggttaatggcagtatcgtggaatctgatttgtggcaaaaacagattaagccatacttgcttactagtattggcgacttacaagggaaaattaatgattatttagaaaatccagtaatagaaacaaaagagctagctaaggctaaggaagcttttaccttgtttgcacaaaatttagatcattttgtttttgctttagaaaatgatgcagactacgataaacaacgaaaactattacgttcgtgtgtttttacagcgaattatcgtaagtcaagtaaatgggatgaagatgttctaaatttttatgaagacctacaaaagttaaaagatgaagcaaaaaatttggtttttgatacttttacttcattttttgctgttgatgaacaagaacaaattaaagtcatgcagcgcggccaaaagattgttgctgcaattgctaaatccgagctagccttgattgatcggtttaataagctgaagcgcagtgaaaatttgcttgactatagtgatatggaacaattggcttatcagattttgagtcaagatacatcgaattctcaaatggctcgtgaattttatcaaaataaattcaaagagattttgattgatgaatatcaggatattaatgctttgcaagaaaatatcatccagcaaatcaaaaataaagataaaaatacgcttttcatggttggtgatgtaaagcagtcgatctatggctttagacaagcagagccaagcttatttttgaaaaaataccatgattttgccaatgatgataataaacaaaccaaaagaattctgttgtcagataatttccgctctactgagccggttaccaaaattgtaaatcaagtatttaaaagtgtgctaagttcagattttggcgggattgactatcaaaaagaaggacaattaatttttggtgctaagtattatcctgaaaacactcctaaagctagtgaagtaattgttcatgaaaagaaaaatagcagtaatgaagatgaaaatgagatagatttttctgaaattcaaatggttttagcacgtattaagcaactaaaagaagagcgtgtacaaatctttgatagtaaaacaggaatgagagagttacgttacagtgatattgctatcttgactagaagtcgtagtgataatttggaaataatgcaggaatttgctaagcaggatataccattatttgtaactgatgcgaagaattattttcaaacttttgaattgactgttatgatgaactacttaaagatcattgataatcccgatcaggatattccattagtttcagttttacgttcgcctttgtttaattttggtgaaaaggatttagctaaaattcgtatcaagagtaagaactctactttctatagtgcattgacttcttatgtaggtgtaggagatgaattaagtactcgaatcaaagattttttaaatcaactagctgatttgcgcaagtttgccacggcacatcgtatttctgaattgatttggagcatttatgctaggacaaatttattagagataatgaccgcactacctaatggtgaacagcgacgagttaatctagaagctttatatgaacgtgctgcttcatatgagagtgcagggttcaagggattataccaatttatcaattttattaatcggatgcggcaaagtcagaaggacttggcacagcctttattaactaaagaagctggtaatgcggtcagattaatgactattcatggttctaagggactagaatttccgatcgtgttttatgtggggatgcagcataaatatcaaatgcgtgatttaaaaggtaactatgtgattagctcagatagtataggaattacgctccgtgaagaacattatcggattgactctttagttaaagcgatgggaaatgtaactaaaaaaaggcaattattagaagaagaagcgcgaattctttatgtagcattaacgcgggctaagcagaaattaattttggttggcgatgttcctaatctggataaacgagttaaagaatggtcgactgaactaaatcagattggtcaattatcattagcagataagttatcttccactagtccattgagttttatgggacctgcgttggctttagatcgacacctagctgtgaaaatgtctgatattactaattcgttggataagagtcagtcgtttttatatattaattatgaaaatgctaacggtgaactacctgattatcagaaagcggagacaagtaatgataaaacgcaaagtaaccttttaaatcaaaccactaaacggctttatcaatttaattatccgtttaaagatgctagtgaaactacagcttaccaagcggtatctgaaataaaaaaagcattcaacgatccgatcgagaccgaattagagaatgcccacttattgacatcgactaatcgttatttacaaccgattgatactaaacctaatttcttgtatcaaactaagtttactggtgcagaaatcggaactgctacacacatgattttgcagtattatgattatcaaggcaatggtgctgaagatcaactagaagtagaaattcaagaattgattaagcaaaagaaactgaatccagaaattgtttctagtttaaagaaagaccaaattgagtggtttgttcatagcaattttgccgaggaattttggcaaaagccagagaatttaaagcgagaaatagatttttctagtttaatctccgctaaaactttgtttaaaaacttttcagatcctaatgccaaaattttggttcatggtacaattgatggctattttgtcaaaaatgatggtattattttgtttgactacaaaactgaccacgttgatcaatcgcatttatctgaatcaattgaattgattaaagaaaaatatacaggtcagcttagactatatgaacaagctatcaatgaatttagtcaaaaaaaagttattggaaaatatttaattctgcttgatgctaaacaagcggttgaagtgaaatagaggaaggaggaaattatggcaaaaagttttactaaagatacatttgctgtagttgatctagagactacaggaacgcaacgtgagaatgggcatcatattattcagtttgggtgtgctattattaaaaatctcaaggtagttaaaacttattcatttttgatcaatccgcatcgtgaaataccacaatcagttgttaatttaaccggaattcatgatcaagatgtagcaaaacaaagagattttgattattatgcacccaaaattactaaaattttgcaaaatactgttttcgtagctcataatgttgactttgatttgccttttttgaattatgaactagtgcaacatggttatgaggcacttacaaataaagcaattgatactgtagaactggctaagattgcttttccgacttttccatcttataagttgagtgatttgacaacacaattggggattaaacatttagatccacataaggcagattctgatgcttatgggactgcagttttattgcttgaaatttttaataaattagaaagtctacctcaagctacactgaataccctcagttcattatctcatgggcttattcgggatacctcttgggtgattacaacgattgcagataatttacgtcaagaaaaacggcctttaggtaaagaatatatgcaagtgcgtaatattattctgcaaaaacaaaatgataattctgaagcacatggtgggaatgctaaattcccaaagactgactcagagaaacaaaagctatttaaagatcatttacactttcgtagagctcaagtcgacctaattaatcatttgcatcagtttattaatgatccagataaaagggcgatgctaattgaagcacctaacgggactgggaaaactttttcttatctttttgcttatgcttatcagctttattctggtagaaaattagttgtagctacaccaactaaagtgttgcaagaacaagtgattgaacatgaaattccgcagttatttaaggtgactaagttggatttgactgcagaagtagttaagtcaagtagtcgttaccttgaccttgacggatttgtacagacgatttttcaaggtacaccgaataagcaaaccttgatattacagatgcagatactggtttggctgactaagactaaaactggtgatttagatgaattaaatttaactaactataatgcaccactctttgcacagattcaacatccaggggatgcaagagtaggtagccgttttgcaggggtcgatttttggaatttagcgcgtaaacgacaagaagaagcggatatattggtgactaatcatgcttatttggctaaccactatatggatacaatttggggtcagaatccgtatttagtcattgatgaagctcatcgtttcacagacaatgtcgtaagttcgcgtaatgattctttgcgttttgaagctttgtggggagttttaagtcatctccgtaatttgctttatttctcagatgaaagtgttgaagcgcaatttaatgatgatgtgcagctgaaccttttactaaagaaaatagatcctaaaattttggaattaattcagttaattaatgaattacaaaagcaactttattttcaaagagataatgctgttaatcggacagttttagctaatggtaatctagaacttagttttcaaggaaaaagtttatttggcggaaatagcaagtttaaagcgattttacctaagttccaacaaaaattagaagaggttagggacttaactaatcaggttttatttgaattatataatgaacaagaacgcatgctggctaatgttgaggtattagtcaatgagattacggaacaaattgatcgcctagattattactctgaaaagggctatcaattggctgatttgctttctgatcaaaaaggtttagagcaagatggctttattttgatgattactaatcttgatgatccactaagtaccaatttagactggttaatgcttgatgctggtgaagtattaaaacaaatctatagtcgttttgaccatattgccttcgtcagtgctactttaaccagtaatcgaaattttgaatatgcaatcaaccagttagctttaacagaattacatccggttgaatatattggtaaaagtacttttaatataaaaaagcatttacaggtactggcagttaataatatgcctagccctgatagtgaagaatttgaaaagactattgcacaaattttacttagtgacattcaagataagcaccatgtacttgttttgatgactaatttagaaaaaattaaaactgtttttaccatgattatgaatgagccacagctaaaagattttgaaatcttagcccagggattgtctggttccaataaccgaattgctaagaggtttgtaattgctaaaaagtcaattataattggtgctgatagtttttgggagggaattgattttcatgattgtgggattgatactgtttttgcggcaaaaatcccgtttgaatctcctgatcaacctgaagttcgtttaaggcagaagaaattggaagatcagggaatcgattcttttactaaagatagtttaccaagagctgtcattcgttttagacaaggaatgggccgtttaattagaggagaacaggatcatggtcaatttgtaattttagacccaagattatggactaaagattatggtcaagagttccttcaaacgattcctgtcaaagttgaaaaggttactagagaagaattaaaaaagaaattagaaaataaataattatgttacaagatgatacaagacaaacaatcaagtttgtgagttgggtaattggtttgataatagttgcctttctagccagcattgctatcttttattatgctggatctagaagtcggggcaatgatcaaaaagttacgcaattggctactagtaaaacaccaattagaaagattcaaaactattatcatttagatcgcggcactagcagctatgctatagcaggcaccaataataagggaaaacaatattactttatttatttgccaaattctaaaaaggcatatctatatcctgcggccaaaggaatcactgaatctaagattaaaaataagtttaaatctatccatacggatgctacaataaataatattaatcttggttggtataagggtgaggtcgtttggaaagtggcctacaaaaaacaaaacggcaatctaggttatactttatatgaattcaaaaatggaaatgatatctcagaagtcgataatttatagaaactttggtattatggaaactgtataattgatgaaaaggtggataggattttatgacagaattgatttcaattaaagattcttctaaacatgttgatgaagaagtcaagatgcatgtttggttaacagataaacgatcaagcggaaagattatctttttgcaattacgtgatggtactgcatttttccaaggggtagtacgtaagaatgatgtatcagaagaagtatttgatgctgctaagtcacttagacaagaagcaagtttttacattactggtactgttcatgaagacgcacgttcacactttggttatgaaattcaaatcactgatttaaaagtggtttcaaacaatgaaggttacccaattggtaataaggaacatggtgttgacttcttacttgatcaccgccacttatggttaagatcaaagaaaccatttgctattatgcaaattagaaataccatgtttaaggctactgtagatttctttgaaaaagaaggctttatcaaatttgatgcacctatctttatgcattcagctccagaaggtactactcaattattccatgtagaatactttgaccacgatgcatatctttcacaatcaggtcaattgtatggtgaagccggtgctatggcttatggtaagatctttacttttggtccaacttttagagcagaagaatcaaagggtcgtcgtcacatgactgaattctggatgatggaaccagaaatggcttggatgcatcaagatgaatcgttagatattcaagaaagatatcttgcctacatggtgaagcaagttctagaaaataatgaatatgaacttaagattcttggtagagatcctgaaaaacttcgcccaactactgaaggtaacttcgttcgtcttccatacgatgatgcaattaaaatgcttcaagatgctggacgtgatattaagtggggcgatgactttggtgctccagatgaaggctatatttcagaacaatatgatcgtccagtcttcattgtcaactatccaacctcaattaagccattctatatgaagaggaatcctgataatcctaaggaatacttatgtgctgatgtaattgcaccagaaggttatggtgaaatttttggtggctcagaacgtgaaggaaattacgaaatccttaagcaacaaattcttgacgctggtttgaatttagaagactaccaatggtaccttgacttacgtaaatttggtggagttcctcactcaggtttcggtatgggctttgaacgtactattgcttgggtttgtcaccttgaccacattcgtgaagcaattccattcccaagattgattaacagaatgcaaccttaatttggttaataattaaatattgatacacaaagttggactagttattagttcaacttttgtttttgaaaggaaattattttggaatttaatgattatcgggcattaggctttacaaccttacaaaatggattgatcgcttactaccctcaattaggcattagtgatgctgaactaattttgataatccaattggaagcatttagccaacgaggtgagagttttccatctaatgaaaagattgctgctaatactaatttatcggttagtgatgtgggtaatcttattcagcggctaattgaacgaaattatttaactattgaacaaatgactgatagtcaggataaaattggtaataaatatagtctcaataagttgtataatgcacttgatcactatattgatcaaaacgtcttgatcaaagataagaaaaaagataaaactgtttcagttgctaataatttagaaaataatccgttaaattatttgtcacgaaaagtagaagttgaatttggtcgctatctgagtccaattgaacgagaagagattgcgcaatggttaagtgtggatcactatgctcctgaattaattgaacttgctttgcgagaggctgtattgtctcaggcatattctttaaagtatattgatcgtgttttacttaattggcaaaggcatagtctgaaaacaactgatgaagttgagagatttttgaaaaggaatcgataaaaatgacagaagatttattgagtgatgaagaagcacgtagagttttgaaaaaaattttagcattgtatcctgacgcacaaggtgaattgcaatgggatactaactttcatttactttgtgcggttatgttgagcgcacaaacgactgataagatggttaatcgtgttatgcctagttttagtaaaatgttcccaaccccagaagtattagcaaaagctccaattgaagagattgagcatgagataaaaactattggtctatttcgttcaaaagctaaacatttaaaggccactgcgcaaattttggtcgataaatataatggacaggttcctaaggataaaaagttattgatgaccttaccaggggtgggagagaaaactgctaacgttgttttggctgaaggctatggtgtgccagctattgctgttgatactcatgtgtcacggatttctaaaaagttccatattgtagatgacaaagctactccacatgaagtagagaagcgattagaagcaattttacctaaaagtgaatggataaaaacgcaccatgcgatgattctatttggtcgttatacaatgccagctcgagctaaaggcgatccgtattcttatttaaattccgaaaagtaaagccgaaataaattcggctttttttattgaataattttatataatctgttgttactaaattttgattttataatttcaggcctcaactacgtttcggccaaaataaaaacagataacaaaacgctatctgttaataaatatatttaattattgcctagtcattatccgaatcatcattacgttcatgtgattcttcctcaggttttctcgttgatgaactttgttgtgttgaagaagattgtgttcttctttgagaggaagaggctcgctgactgctattggattgagatgatgagccattttcacgacttgatgatgattgagtaactgcagttctagaagatgaaggagtagttccagtattatcgcttgaagtatcagtttcttcatcgtcttcatcataacttgctgcactattaccaattccggctggggtatggcctcgaacaaataattgccaagtgccgccaccagttgctaattctggaggattagagttatttacaattttcgctcttacaactgagctaggctgtttccagtctaggttaggcttattgttcattaggtaggtcatcatactcttatacattagctgtgcagattgttgacctattccagaaatagtaccgtcctttaaattatcgtaaccagtccaaacacccataacatatgatctggtataaccaacgaaccatgaatcttttggagttgaattatagcttgggtacttagctagatcttcatcagagtatttaacagtaccggttttaccagcttgataaagatctgcaatttttgcattagtaccagagcctcgtttgattacgcctttaagcatatcggtaatcatgtaggcagttgatttcttcattacacgtacaccatttgaatcataatttctggttaatccatctggtgtttcaatcttagaaacaaattgcggcttgtggtatacgcccatggtggcaaaagcactataagcaccagtcatttgtaaactagacgcattagcgccaattgctactgataaaccagattttggtgaaacattaacgcccattcggcgagcaaaagctgaagcccgttttactccaacttcagcaagagttttaatagctggaacattacgtgactgctccaatgcatgtcgcatagtcatcatcccgtcgtatttgttgtcccagtcatataattggatattggtaccaggataaacatacttactgtcatcaatcatttttgctgttgaccaattcaagtattgaatagcaggtgcatagtcaagtactggcttaattgacgaaccggtagagcgtccagtttgaacagcccggtctaatcctaattgaacagaaggtaagtgacgtccacctaagattgcaacaacatgaccattgtttggatcaactacagttgcaccaatttgcattttattgtttgtaaaaggtacagaaccgttgttagctaactcgtacagcttgttttgagctttttgatcgatattaatagtaatctttaaattatcgtgatatggatcaaagcctttgctcttaacttcagaaattacctctttaatgtatggatcatcaatttttctaatcttagactcgttattatttcgatgtgatttaagtcccttactaattggttcagcaactgcttgattgtactcagctttagtaattttgtcattttgtagcatagtctttaaaacaatatcacgccggtatttggccttttgcggataaagatatggatcatatgcaacaggtgcattcggcatccctgcaatcaatgcagtttgtgccaaatctaacttacttagtggcttaccatagtagtagttagaagcagtacccatgccataatttccatagttcataaagactttattaatataaaattctaagatttggtctttactgaattcatgttggactttcatagctaaccaagcttcttgagcttttctcttcagagtacgttgagaagcagcagtagagaagaccgttagcttaactaactgctgggttatagtagaaccacctgcagcaatactattacttttggcattagttaacatagaaccaataattctaattgggtcaacgcctaacttatctttgtaaaaacgtttgtcttctactgaaactacagcatcttttaattgctgaggaatgtctttatttttaacataaattcttttttcagaaccaagtgatagtaaaaacttaccattattagtatatagacttgaagatttaccactctgcaattggtcctgactaatgttaggagcatctttggcataaaaagcaaaaagcccgattccagagattactattaaaaatatcagcaaaaagatccatttaatgattctaatccataagtggccactacttggccttcgaccatgatagtctcttcgtgattctcgtttcatattattgttattatctgccatgattatcttttcctatctgcaatgaatttatctaccgccttaagataaggcagtgtaggacgaaagccacttttgatttcaaaagaattgttttcaatttcttttaaagtcattgagcttttatctttttttcgccaagctcgaattacaaaactagctggagtaacaaagtagcgctctaagctagcgaacctaataattgtaaaacaaattccttgttgttttaagcattcgtccaagtgaaaaatttggtgttcatgaaagttttttaatgggaagttagttttattccgtgtttcttttgcctcaaaatcgagatagtatcctttataaacaccattatagtcagttgttgaagcttgcctaaagtaagcttcacgaatgaccgccttagaacgtttgggataatcaactttaacaatttgaattggggttggctttttatgaacaactgcaatttcttccattaaataatatttattagattcattgatttgttgctcaagtgtcatcccacgatcagaaaagttaacaccttttttatgatgatatgatcggtgaactggatgttcatcttttttagttacaggttttctaaatgcggctaaactaccgctaggatatttgaccattgtcctcactcctgttagcattatagcaataaagactacatttttgaacataaaggggggcttaaacaaatgcagcgtttatgggtgactggctatcgcagctatgaattaaatgtttttggcgatcgtgatcccaagataactgtcattaaatatgccctaaaaaattatctgacaagtctactggatgatgggcaattggactggattattactggagctaacctcggtgtcgaacagtggacagctgaggttggacttgaattaggagaaaaatatccggtaagaacatcaataatgattccatatgaagaatttgctaatcgatggaatgatagtaacaaagctaaattcttaaatttgaaggaaaaagtggacttttttgcttcaacttctaataccccttatcaaagtccacttcaattacgtaattatcaaaattttatgattcagcatactgatcgagcattgatgatctatgattcagagcacccaggtaaacctaaatatgattataatttaatccaaaaataccaggaaactaaagaatatccattagatttaattgatttttatgatttacaagatgcagctgaagaataccaagaaaatcatcaaataaatcatttttctgaataatatggtaaaaattttattaaagtctgtttctttattttcagtcagcgttgtttttgctaaaatagggtggaatgtaaaggagttgtcagtaagatggcaaatttaaatgatataaaattatcaggacaagatatattaaagaaacaattcaaaagtaaagtaaagggatatgatcccgatgaagttgatgcatacttagatgaagtaatttctgattatactacttttcaacaaattatcgaagatttgtatggtcagatcggtacgctccaacgtcaattaatggatgaaaagcaaaaagcaaagaaaacagttgaggctgaagaagaaaaggttaagacttatatgccaacgcatagaagaagtgcgcctgtgaagtttgcagaagatgcagatgatactcaaggtgaaatttcgactaatatggctattattcaacggatttcaactttggaaagaaaagtttataatctagaacaacacgtttatggattaaagcattaatttttgctataatgactaacagtgtgaattttgagtaggcgcggctagcttatgttagctgaggaaagtccacgcacacacagactgcgatgtttgtagtgatcgtattcagcctaacaagctggaggaggacgttagtcttcacggcggaaaaagtgctaaatcttcggacatgcattactatcctgaaaagtgccacagtgacgaagcaaggtcagaaatgactttggtggaacgaggtaaaccctgcgagtgtgaaacccaaatttggtgggggagtttcggcctaaggaaatgaactaaaggtcggattattgctttaagcagtaaagatagatgactactgaaggtaatctttgccagagattattggaacaaaacgtggcttatagaaattcacacaggcagagttgggcttttaggtccagctcttttttattttgaaaatgaaagagtaacaatgaaagaataccaactttacgcaactatgggcgctggttttgaaagtgtcgttaataaagaattacagtctatggggtataagacccgtgttgaaaatggtcgtgtcttttttaagggtggtcaagaagatatagttagaactaatctttggctgagaacagctgaccgaattaaaattttgctaaaagagtttagagcaacagattttgataccttatttaatgagatttatgattttgattgggccgaattattgcctgttgacgctaagtttcctgttcaaggtagagctgtaaaatccaaattgcactctgaaccagatgtacagtcaattgtaaaaaaggcaattgttaataagatggttgaccagtaccatcgtcgtggctttttgccagaaactggtaatgaatatcccttagatattcatatttataaaaatgtagctcgaatttcgctagatactacaggcgctagtttgtttaaacgtggctatcgagtagagcatggtggagcccctatgaaagaaaactttgcggccgggctattaaaactaactccatataatggtactcaccccttaattgatcctatgactggttcaggaactttagctattgaggcagcattaattgctaaaaatatagcaccaggaacctggcgtaaatttgcctttgatggttttgactggtttaaccctaaactacataatgaagtattggcaaaggctaagagtgaagttaagccgcttggagcaccgatttgggctagtgatattgatcagtctgttcttgaagtagctaaattaaatgctcacaatgcaggtgtattgcaagatattcgctttaaacaaatcgcagttaaagactttactactgatctagaaaatggaattataattgcgaacccaccttatggtaagcgattgaaggatcgtgagtcggcagaagagctgtatcgccaaatgggagaagtacttagaccgcttagttcgttcagtcagtattacttaactgcagatcctaactttgaaaaatgttttggtgcaaaggctactaagaagcgcaaactatttaacggaaatttgcgggttgatttctatcagtattgggctaacagaaggtaagaaatgattacaaaagagcttaacacagaattttgggtgatctcagatacgcacctaatcgcagatagtttacatgatgaaggacaagccttttcacgcatgcaaaaaactagtcaaggtaaggatttgtattatcaagaaatagccctttctgcttttatgcgaatggcacaaagaaaaaagcctgccgcaattattgtaactggtgatgtgacatttaacggtgaacgagtttctgctgagaaatttgctcaaatttttaagccgttgaaagaaactaaagtgttagttttacctggaaatcacgacatttttgatgggtgggctagagaatttcgtggtaaaaaacagttctatgctggtgaaattagcccaatgttttggcgctcgatctttgataaatcatatcgtgaggccttagatgaagacgataattcattggcttacagtgtccaactgaatccgcaatatcttttagttttagcggattcaaatatttatggaaaagaagagacaacagaagcaccgcacactcacggcgaaattggaaaagtacaattaaaatggattgaaaaacaatttcgttatgcgcaggaacatcagttacgtccggttttatttatgcatcataatttatatgcacataatccagcagttaacaagggctatgtagttgatgacgctgttgagctacgacgtttgtgtgcgcgttacaacgtgaaattagctttttctggtcatattcatgctcaaaatattatgggaccacaagacatgacgcctacaactgagatcgttacatcaagtttttgttctaatgatcaaggctatggagtagtgcgagttcattcacggcacattacatatgtgcggcgtaattttgatatgacaagatatttaacggatgaggaaaaggaaaattatactttagttcattatcataagtatttaaaagatctacagcttggtagtatttctgcggatatgatgcaaagtgaattaaatcagtatcacgaagacatcgagttagttagggcgatggggaatttgtttggctggatgaactatcatttctttaatggtcataatcatataaaggctagcgagttgaataaaatccatgcttctaaagaatatcaagttttgattaagcaccatcctgagtatcggttatatctaaagacgctgtacgacacaagtgatcactctaatttacaagtgaagatacgatactaaacaaattttagtataatggatactgattctaaagaaagcggacatgattatgttaaaagatgaaacaaaatttgatcaattagggcaaaagctttttatgaaaggtgttttgcaagacttcgaaaagaaaaatggtccaattaagggcagaatgatggttacagaaggaaagattccgccggaaatgttaactaagctgcaatctgaattgatgaatagtagtaattggattgtagttgaaggtagttttgatttttataattatactgtcggcatgattgtagatttgactacaggtaagccattagcaaatggatggttggtaccacaattgggtcacccagggatgcaacctgcagagaaatggcaagaatttttgattgaaaaagtcgttgatgcaatcgatgaaaaaggtaagattaatttgccgctatatgtttggatttcagatcgtagtgatttgaccaagacggatcaagatttataaaaatatttttaattatgtaaagcttaaacaaaaaggtaggtcaattttgacctaccttttttaggatttatttattagtattaagaagttattgaattaagtaagtagatattatttaaccagtttaattttcaaagtgagctagttattaattgcctgagcagatttttgagcatcccaccaatcgggtaaatcacacaataacttatttaatgtattattgcggtgcgaaattgagtttctctcattgagattcatttctgcaaaggtttttcctagttctggaactacgaataaagcatcgtaaccatagttactgctaccatgtggatacttagcaattaatccactgattctaccagcactaacaatatcattgctttcttgacctggccaagtaaagacaaaggtagtgtagtagctagctgtccttttttcactagaaactccacctaaatagcctaataatttagctttatcatcttgaccattatggtggtaaggcaagattcctaaagagttaagtagataatcaacacttagacctgagctttctgataatgtaggcaaattggtaaattcagctaaacgatgtgctgtagctctagcattacttaaaaatgttgcctcagaatatgacttttgtggtgcataatctacttcagctaaaccaactactttgataggaagactaagctggttaagtttatcttgtaattcattaattttattttggtcatatgttgtaaataataaactatccattattttccccatgctttcaaaaatagatataccatttatattgtatccgctttcatatactgcacagtcattgtcttatctttgtgaagtaaagtcaagcatagataatagcttttatcaaaaagtccatatacttcaggtttttaaactgaataatgttatttttaatgactaagattgtgaaaattatagaaactgtcaaatcttttgtgtaaatagatctttctcgtaaattgattttttaattatttatttaatcaaagtaggattctaaggtgtcctgaacctgaccaaagcctttatgaattcgattgaaataacggtcattgtagctcattgcctgaatgccaataaaagcatcaagcgactgttcagttggaaactctgccttaggcttagctttgcgcttgatcacattgttaaatgattcaatcatgttagtcgaataaattgaagctctgatctgcttgggatagttataaaagaccagcagatctggttctatgtctttcaagcttctgataacatggctgtaaaccttgccccatttggtatagaagtcatgcaggacagctgtggcttcttctttgtttgtctgttgatgcacctgtttgaattcgttcatgatcttttcacgatcgtcgacgcgtactttagcgcagatattgcgcatgacatgaaccaaacagcgttgaaaatgagctttaggataagtcctggccaaggctgttttcatgccaacaacaccatcagaaagaaaaagctcaacttgctttaagcctcgggatttcatgttttgaagcatctctgtccagacttcaatgttctcgctaggcgcaatgcagtagtcaatgacctccttgtgcccattaggcttgatgccaatggcaatatagactgcttcacgctcaaatgtttctcggcgcaaaggaaggtatgtcgcatccaaatagacgcagaaaaacttgtcgcttagcttgcgtttgtggtaagcctcaacctttggaatcatctgcttggaaatatttgatacctgagctggactgtaatggctgccatacatcttttcaattagatcggctatgtccctggtggtcacgcccttggagtaaagcttgataatcatgctttccaagatatccgagtgctgcttgtagtcaggcagcgtgtgctgatgaaattgaccgttgcgatcccgaggcacttgcacttcaattgggccaaattgcgtatcaactttgcggaaataagcaccatttctagagttgccagtattccagccatttctggcatagggatcatagcccagaaaggcagtcaattcagcttctaacaagttattaacagcctgttgtagctctttgcgcaataaatcatttattttgtctggattgaatagagcttgagcaaaatctttggtaaaatcattcatgaaggagttcttctttctgtatgtgtttttttgttcaaaccaatcatacgagaaaggaactcctttttctaatgtttaaagaaataaatttaaggaatcattcatccttacacaaactattttacagtctcaaattataatatgaattcatttcaatttatattacttttatatttataacaatcttgtataaccttttgatatataatttctctgaggttgtttttttatatgaaaaaacgaaatacatttatcacactaaacttgtatcaaattacacaagatagagtgattaatcattaactgaaacttgaaagctaagattaacgctccttccccgcgcctcttggctttttcttatcaaaaataaaaacgcaggctctctctgcgttatactttaagtgtcgacctaaaaagtaaaggagatcctgcgcaatgaacagtatagaacaaatcgacacagaaaatgatactaaatccttaatttcttcatttattaatctaattggtctagctaagttaactaaacaagtcaattttaagcgtaaatccaccgtttcattaaccatgattatctcttggctgatgtcagtacattttgctcggctttctttattcagagctaaggatgacaaacgtttttccgttagaactgctcgcaatgtacttaacgatggaagaatcaactggcaaaaactattatgcttgattgcagcccggctcattggctgcttaaaaccatttatcgataaaagacgccgacttgcttttatcgttgacgatacgctgatggctcggtctttttctaaaaagaccgaattgctagctaaagtctatgaccatgacaagcatgagtatttgaacggatatcgtggtttaactttaggctggagcgatggcaataccttcttgccggttaactttgccttgatgtcaaccaaaaccaagaaaaatatgattggagctgctcccattactgctgatgaacgttcaatttctggtaaaaggagaaatcaagctcagagaaagatgaatgatgtaactgtagagttgattagacaagccttacgattaggagtagaagctaaatacgtcttattcgattcttggttttcttctccaagaatgttttggattttaaagaagatcggtttagatggacttggcatgatcaagaagagttcaaagatttattacatttatcgccatcgccgctatagcgttaaagacttgtatgatcgtttggctgcttcaaacatccgtaaaaagaaacattatctttattcaagcatagttgaggctcaatatcatggacatagctttttattaaagctcgtctttgtctccaaccgtggaaacaagaacaagtatttggttttagctactactcagacaaagcttagccctgaagaaatcatccaactttatggtcgtagatggcaaattgaaacatattttaagacgtctaagcaatatcttgctttagataaatctcaagttcaaagctatgatggccaatgtggctatatcgcagttacagcaataacttatgatctattgacctggcaggaaagacaaaatacagatgataagacaatcggagatttattctatctaatgaacgaatccttacctgatattagattcgtagatgcattggtctacttaatttcagaattaaaagagcttaaacagaatagttttgaaaagatagatgaagtaatcaatgactttattaaccaactgccacgattcatacaaattgcactgaaacagatcatataaaaactaattacgtctaagaaagctcaatagtgacaggacttgagcttgattttggtgctttcaattttcagtcaattaataaaaaaatcaaaattgtattttaataaaaaagagaaaatcttttttagattttctcaattatgattaactagctattaaaaatttccataatgcattattggtgtaccagttttgcggttgaattgctcctagacaggctacaataatataaattgctaatgttgagattatgaatgcaatgcctaagttgacaatgttgaatggaaaggtagttttatgttgtttcattgcgatgtgaatggcgaaagccaacagaaccaaacctataataattccaaattgataataaatgctcattttctctcctaagttacagttaaaagtatacgttaaaatcggattaaagagtgatttttatttatctagcctctttattttatcaaaatcaatgttatattagagaggtagaaagaagattatgtacatatgtctgtagatatttacaatgaaaaacttgaaccatacgacgatggtaagcgtcataaatttagtggtacttttgatagattaaacgatcgcttagctatttttaaggatttgcgtattgcaggtgctggtggcaatccaattgttaagcagttagcactgcattacttgaaaactttcaaagaccttgatttgaagaggggcgatgtagttgaatttgaaggcatggttgaaaaagattctaacaatggcttcacaattgaacgcccaactcaagcagaaaaaatcagatcagcagctgccgatgatgctaaagttgacgtggttggcgatgattggaattggtttgaaaattagttaacggaagtgacttacgagatgtaagccgcttttatttttgaaatttaagtcatagctagaaatgtagtaaaattaagcttgtaaggagaattagatgcactttgatatctttaatcgaaaaactgtctcaactgataaaatgtttttccagacaacattaaatcctaagcaagcaataatcattggcaatggtgctaaatttcgacgttgggttttcttttctactaattttgctacattttatgtaatcattctgtcagctattagtattttattaattaagtctaatgtttctgtactaatttgcttactattagcattagcaaatttagtaattaatcgctcaatacctcgttattggcaaactttctttggcccgaatgctgaatatggaaaaaatcatcgtccagctattttgcctattttatatatcataaccttgttcggttggctttggagcgtatcacatttcgtaggatctttaacttttattactggtacatttgtgctagtaggtcttgcaggtagtttgttatcgctctggatatggatgaatttgaatactgttagttgtgctccaatcagtgaattacaatggcgaaacaatgccaaacgcaggggaatgtctgatgaagacattgataaggttattgctagtttaaaaaagcgtagagcaatatattttagtaaacacgataaataaaattatagacgaaagatagaatttaatgacagattttacagaatttgaaagtacaattttttcatcagacgataattttgccattcgaaaaattaaacataatgtcattttgacgtattgcactcaagatggtgaaaaagaatatgaaagcctaagtaagaatacatatcgtgtattttttgaaaataatcttgaagttagtcgactgtatccacctgatgaattcagtcacaattggctaatccaaattttaatgccgcaactttcaattgattcgctcaaatctatggcgattgccttaactacattagaaagaattgcgcaaagtcaagaaggcatgcaatcatctgaatatgttaaaaatagtgagttagtagaaataaagtcctggtttgatctgcgtaataagttgcgaaaaatatccaaagcttatagcctaattaagcaaagtactgatcaaacaacacagtggctaggaagtgatggacatcgttatcgtgaagtgattttagccaatagtttacggcttaattatggtcaagatgaagttgttcgtttaattccaattaaaaataattgggttattcagtttgttaaaactgatttcagtgcaactgatggcgtaattgatcagctttttgcggcattaacattattgactcaatatgtaaaacaaatttaaatcagagatgaaacatattctttatgcccttaatgggacttttttaatgttactcgttccggctttatttgtattagcattacgacaattaagccatgaagctaaccaaaaattggtaaatacatttggttttaatagtcaaattattgctggcggattaggaattattgttcatgaacttagtcatttgattatggctataatttttggtcatcatattaatgcggttagtttattgcgcatccctagtaataccaatgatatgtcacttggctatgttaaacatacttggtctcctacatctacttatcaaaaggtgggtaatgcttttattggcattgcacctgtattaggatgcaccttgctgatttacataatcatgcgtacattgaatacacctatttcattggttcagaatcagcttactactcagttattaagtaatggtaatgcacttaactggaatttcttaactcatagttggatttatatttttgaattatttcagcttaattttgattcaatatggcactcaattgttgctttattgctagtaatcagtctatgttttggtggattcgatttaagcgaggctgatataagtagtggcaaatatgcttttttaggattaattggtataacctttattatgcttctcttagtttcttttctaggctttcacgctgcattattaccgtttttagttaatattactgtctggatttatttggtattcattatatcaatagtgattttagcaataattaatttaattatgtatattttaaatattattttataaaggagaaaataatggcaaaagcgttattagttatcgactatagtaaagactttgtagctgatgatggagctcttacttgtggccagcctgctcaagcaattgatcaacgtattacagaactgtgtaaacagtttctacaaaataaagattgggtgattttcccgatggacgcgcacttaaaaaatgatccatatcaccctgaaactaaattatatccaccgcataatattattggaactgctggccgtgaagtatatggtcaaacgggtaaatggtatttagaaaacaaagataatgatcatgttttattaatggataaaaatcgttattcagcttttcaaaatactaatctagataattatttacgtgaacgccatattcatgacctgacactaactggtgtttgtactgatatttgtgtattgcacacagcgattgcggcatataatttagactatgaaattacaattccacgttctgctgttgctacttttacatcaaatggcgatgaatgggcaatggctcactttaaaaatgcattaggtgcgaatattgctgattaatttaatggcctgcataatttactagtaagtccaattattactatctaataaaaatatacattataattaatgtaaaggaaaaagctatgtaaagtgaagaggtcaaaatgtatacaaatattcgtaaatttaaaaagggcggaaactacccggaacagcaaaatgggctaccacaagcattttttcataatcccaagtataagaagttaagccccgatgcatgatacctatacatgatacttacgatgagaatgattgattcacaaaccaatggatgggtagatgctgacggtaatatgtatattatttattctaatcaagagctaatggatgacatgcattgcaattcttatacggtgaaacgactaaagaaagaattggttaatcatgatttgttactcgaagaagatgctcctgcagaacatgatgataggttatatcctttaagaattaatgaaaacgaaaaatgataaaagacattggtaaatacggccaatgtcttttatttagtattagtaaagaaaataactaatgtatccgcatcaggataaggctctgaatgaacacttaagaaattttgcagtttatgattgtattcaatattattttcactttgactattttgataaatttgctctagccagctcggttagccggataaatagcattgttcatggcggaacctacagcgttactttgaacgtcatttagtaaatatgatgtcccaatttgattaatttgattgagtaaatgatctatgcgttctatttcctgcttcttatcatgtacgtttggcacaagcagtagagagacggctgtaatatccatttcacattgtgcccaaaatttatcataaagcttgctaaagttttgatctgattgagctaaaagccattcctggtagatttttaaaatacgaattgttttttgaatatcatataaataaagcttacgataactaaactgctgaaattttcttgtaattccagaaagtagttctgtatagcaatctaagtcttcagcaattttaattgccgagtcatttttatttcctttctgtattttatttacattagctgatacttatataagtctatatgataatactgtactttctatacttttattataagatcatcgcatgatttgttaataacttaaacttcccacacgcagaatcgctccttttattgtgattctgcgttttttaacaaatataaaaggcacatgaccttttcattgctataattaaagtgaccaaacgataattctatgcatgaaaggcttgtgccaatgtctattttaccatctcctgaccaaaaaaatgaacaactattttcaaactcaatcatcagcttcatcaagaagtttcaggtgatcaagctgttgagaaaatgtggcttccgcaaggaaaaaggcattagcctgttcagcttgtttctttacgttttaagcaatgtctttcgtgaccgcagcttatatatgcagctgaaaacggatcattttaaagaaagcttttctaaaaattcttattaccgatttatgcgcaacgtccacgtcaattggctccacttcaccacactgctttctgcgcaaatcattaataatcacttgcgatctttgacttcagaaaaacgggctgattgctttgttgtcgatgattcctacttctctaggaccggcttcaagaaaacagaattagtcgccaaagtttttgaccatgtatcaatgacttacaagaaaggttttcgcatgatgaccctgggctggactgatggagcttctttcatgccaatcaattcggtgttgctgtcctctcacaagctacagaatatgattggcgaaaacaaagtctgtgatcagcgcaccattgctggcaaaagacgcatgcttgcccggactaaaggcacagacgtgatggttaatttaatcgaccaagctatgaaagcaggtcatcaagccaagtacgtgctgtttgacagctggttctcaaatccacatcaaatcgtccagctcaagcaaaggaagctggatgtaattgccatggttaaagttagctccaaaatcaaatatgaatttgaaggagaacgcaaaaacatcaaacagatttatcgtagctgtaaaaagcgacgcgggcgttcgcgctatctgttgtcaattccagtcaaggttggccgccaagacaaagacggtgctaaaattgacgctcggataatttgcgttagaaaccgtgccaatcgtaaagagtggctggctattatttgtaccgacatgtcgcttagcgaagatgaagtcattcgcaattatggcaaacgctgggatattgaagtttttttcaaaacctgcaaaagctacctaaaactaagcacggaatatcatggtctgtcctacgatgccttgactgctcatgtggctatagtctttacccgctatatgctcatgtcagtagccaagcgggacgacgaagatgagcgaaccttaggtgagcttttctattgcatgattgatgagctggcggatattacattcagtcattcacttcagctaatcacaaaagcaatggtggctagcgttgaaaaagtctttcatgccagtgaagcacaaatagcagaattcacggctgactttatcaatcgtttacccaaatacatgcaaaaattgttaaagaaaactagcaaaaatagtatagaagcccaaagctaagcaatatcaaagaattgccagcttatttgatgtgggaagtttaagttaataataaaatgctcactaaaaatgttgtgacaatttattattaacaactaaaaaattatgatagtgtaagtagtaataattatgaaagagcgtgatgtaaatgtctagatggcatagattatttcctgaacgagtttttgatcgtggagaaatatattatggcaatgatatggttgaaaatattcaattagctcaagatcaggaacactttaccgctcaagttcaaggcggaatgggtcgttcttatactgtaactggtcgtcttcgtttagatggtcgagcttcagagttagactgtaattgtccatgggctaataaagggcatcgctgtaaacacgaggttgcggctttacttgcagtagaaaacgaacaagaaaatgaacataacgttaaagtcccttttgctgacttaatttctgaacatcttaagcaaatgattgcacataaaagcccagtacttaaccccttaaatttgattggcaatatgaaatttaccaaaaaaagttatgatcaggcactggaacttaatgatcactggtcgattagtagttgtcggcattttgatgataagatgcgtaaatatgaatattttggggagatagtaacagaggacaatgagttaattacattatctgtgcaatttactcgctggcaaattatatcaattaaatttgatagtgatttttcccgtattgaaaaagatagtgttagaatattagctctgttttactttattaatgagtatcttgatgacgatccatttgatttaactaaccaggccgctgaagatctacttgaattttatagtgacgcttctacccaaaatgatgagccgattattttgcgggcaagtattgataagtataataacatccctagtttgacgtttaaattaggaaagaacaagcatctttataaagttaaagatcttaatcaactagtagatgcatcccgacacagctcttctctaaagctaggtaagtttttcaacgagcctataaatcaggctaaaatggatattgatagtcaacactggttatcttttattgaaaaaattatagatgctcgtaatctaaacgaagaattttattataattacagtagtcaggttggtcgcattacactagagaactctgtggccgatgaagttaatgatttactttatcaaggcgtaaagttgtactcaaatgagcagcctataggatatacaactgatcaactagatttaaacattaaaattgaaactcaaaagtcatctgctttagttagtgtagaggatcttccagtttctactataattactgggagtcatgcgtattatggctattacaaagatgtatggatcaaatatataggtcttacgcctgcttctttgcataatttaggattgcagcctggtgctgaaatgcaatttagtaaaaagaccgttgctaagtttgcacataatattttgcctaaatttgagcaaacaaagtttatattagtgtctggtactgatgaattgaaagctattttgccaccagaggcccattttttgtttaaattagattatcgtgtaggcagtattttatgtgtggctcgagtacagtatggggatgcacaatacgagttaaatcaaggatatactgaagaggaccgacgcgatgttgaaaaagagaccgcagcatggaagcacattaatacatattttagtgattatcagcatgggcggtatgttttatccaatgaagactcggatgtcgtacaagcttttctagatgatggtatcaatgagttgaaacgattaggcgaagtacaaattacagctaactttagatcacttttaaagggaataaagattaatttggatgttggagtaggtatcaacctgactaatgaattattagatatcgatcttgctgatcaaaagatgagctgggaagacattcaagcggctttgaaagcctaccaagaaaagcgaaaatattttgttttaaaaaatggaatgctagctaaggcagaacaaccgacaattgaacaattggcacaaactttgcatgatttaggtattagttttaaggatttcattcacggtaaattacatttaccagcatatcgtgccttttattttgctaagcaaatgaaagctgctaatgcactgcatttctcaactaatgaatcctttaatactctgattaatgatttagctaagaatcagttgaagcaaaatcaaataccagttagtttgcaaaatattttgcgtccatatcagaagataggttttaattggctaagcactatcgttaattataaatttggcgggctacttgctgatgagatgggattaggtaaaaccttgcagattattagtcttcttttagctcgcaaagaaaaaatgcaaaatcagttacctagcttaatcgttgcgcctgcttctgttatctataattggcaggcagaagttaaaaagttcgcacctagccttaatgtggctctattagatggcactaaaaaagaacgagagagattgcttttagatgctaaaaagtataatctgctaatcagttcatatcaatcgcttaatcgagatctagaagcgtaccaaaatctaatttttgatgtagaagtaattgatgaagcacaaaatattaagaatcagcaatcagttaccgccaagacagtcaaagtcattaaagcgcatcataaactggctctaacaggaacaccgattgaaaataaattgagcgagttatggagtatttttgattacttaatgccaggttttttaggtttatatcctgactttaggaaaaagtatgaattaccgattgttaaagagcaagataaagaagcagaagatcaattagctaatatgataataccctttatcttgcggcgtctaaaaaaagatgtgctacgtgacttacctgacaaagatgaagaaattgtgcctgttaaaatgaataagaaacaagctgatttgtataatatgcagacgcaaaagattatcgctcaattaaatggacagggggatgaagactttaagagatcacgttttcaaattttggctcagattactaaattacgtgaaatttgttgtgatcctcatttgctttatgaaaactatcacggcaagtctaataaattaattgctacaattgagttgattaagaataatctagcaaatggacataaaattttattgttttcacagttcacagctatgctagatattttgcatgaaaaccttgccagattaagactacctttatttactattactggatcaacacctaaaactaagcgtcaagaacaagttcaaaagtttaatcaaatggctcaaccaggggtctttttgatttcattaaaagcaggcggaacaggcattaacttgactggtgctgatgttgtaattcattatgatccttggtggaacttggctgcagaaaaacaggcgacggatcgagctcatagaattggtcaaaagcattctgttaagatttataagatggttacagaagacagtattgaagagagaatcattgctttacagcaaaagaaagcagaattagctgatataattttgcaaaatgatcagattgctgatgcaacaatgagtaaagacgatttaattaagattttgaaataaatagatcattataataaaataaaaatatttgtttgtacttgcgaactattgtttgcaaaagtataatatttaggtaaacaaaaaccaacaagctaaatgcttgctggttttataattttagtttgagttagtatgtttctttttataccaatacactagaccgaatggaaccagattctcttggtgatgttcgattcgaataatattgcttcggtgactccagtaaattaagattacgagcaatccactgataatgctcaaggcaagatcgtggaaaaagaatgaagcaataaagattagaactactgagatcaaactagttaatgaaaccatacttgtaataaataagatagggaagaagattaacgcacagatcaagaaaaaatggacattatatcctagtaaaaatccagcggaagttgctactgccttgcctcctttgaactttaaaaagacaggaaaagcgtggcctaaaattgcagctaagccaaaaatcaagcaaagataatgtggtcctagtttaaaaattattggtaatactgtagcaaaagttcctttgagaaaatctactataaagacaatgattccagcagctggtcctaatactctaaaggtattagtcgttccgatatttccagatccgtatttcctaatatctttatgaaaaaagatattacccactaacacacctgttgggaatgatccaatcaagtatgctaaaataaacaacgatgcaaattttaatgcaaacatatttaacaacactcctattaatctatcgctattttagcaaagattatcttttaaatatatggtgctggttaaattaatgaacaagtggaggaattttagtggcaaaagctaatacttatgatgattcttcaattcaaattttacatggcctagaagccgttcgtaaaagacctggtatgtatattggttcaactgatattcatggtcttaatcaattagtgtatgaaatcgtcgataactctgtcgacgaagccatggctggttttggtaaagaaattgatgtaatcattcattcagataatagtgttactgtaagagactttgggcgtggtatgccgacaggaatgcacaaatcgggtaagcccacaattgaagttattttaactgtattacatgctggtggtaagtttactgaacaaaattataaaacttcaggcgggttgcatggcgtaggttcatccgttgttaatgcactttcaagttatatgaaggttagagtcgttcgcgatggtaaagcttatgaagaagaatttaaagatggtgggcatccggtaggtacattaaagtgtgtaggaaagacaaaagagccaacagggactaccattacgtttaagccagatgagactatcttttcaaccacgaagtataagtatgagacaattcaggagagaattcgtgaatatgcttttctacttaaaggggttaaatttttcttaacagatgagcgtgagccagaacatcatgatgtttttcagtatgatgatggaattaaatcatttgttaagtatttaaacgaaggtaaaggcacaattagtgatgtcttttattttgaaggcaagcaagatggcatggaaattgaattttcaggtcaatatagtgatggatattcagaaaatttagtttcatttgttaacaatgttagaactggtgatggtggtacccatgagtcaggtgctcgtagtggatttacacgtgcatttaacgattatgctaaaaagcagggtctactaggtaaaaaagataaaaatattgatggttctgattatcgtgaagggcttagcgcggttttatctgttaaaatccctgaagaattacttgaatttgaaggacagactaagggtaaattaggtactccacaagcacgttctgctgtagattcacttgtttatgagaaaatgtcttactatttaatggaaaatggtgagctggctcaggaactagttaagaaggctcaaagggctagggatgcacgtgaagctgctaaaaaggcacgtgatgaaagcaggaatggtaaaaagagacgaaaaaaagaagttttgtctggtaaattaacgccagctcaatcgcgaaatcctaaaaagaatgaactattcttggtcgaaggtgattcagctggtggatctgctaagcaaggtagagacagaagatttcaagcaattttgcctcttcgtggtaaagtattaaatactcaaaaggcaaaattgcaggatatctttaaaaacgaagaaattaataccatgatttataccattggtgctggtgtaggaaccgagtttaatgttgatgactctaattatgataaagtcattatcatgactgacgccgacgatgatggtgctcacattcagatcttgctattaacattcttttatcgttatatgcggccgatgattgaacacggaaaagtttatattgctctgccaccgctttatcgcttacaaaaaggtcgaggcaaaaagacgcaagttcaatatgcatggactgatgaagaactagctgatgatgaaaagaaaatgggacgtggctattcgctgcagcgattcaaaggtttaggtgaaatgaacgcggaacagctatgggctactactatggatcctcaatcgagaatgttaatcagagttaaaattgacgatgctgctcttgctgagagacgagttactaccttaatgggtgataaagtagccgcaagaagaaagtggattgaagaaaatgttaaattcagaatgggcgaagacggctcaattctagaatccgaagatgaataaaagaaggttttaaatttaatggccacaaaagaacgaattcgagaaatgccacttgaacaagtaatgggtgaacgttttggacgatattcaaaatatattattcaagaacgtgctttgcctgatattcgagatggcttaaagccagttcagcggcgtatcctttatgcaatgtatcaagatagtaatacttatgataaaccatttaaaaaggctgctaaggctgtcggtaatatcatgggtaactttcaccctcacggtgacagctcaatctatggggctttagtgcacttatcacaagactggaagatgcgcgaaccgttagttgaaatgcatggtaacaatggttcaatggatggtgatggcccagcagctatgcgttatacggaatcccgcttaagcaaaatctctaatatgcttttgcaagatattgataagcaaaccgtaaacatggtgcttaactttgacgatactgagtatgaacctacagtcttacctgcacgctttcctaacttattagttaatggatcaactgggatctcatctggttacgctacagagattccaccacataacttaggtgaagtgattgatgcaacaatttatttattgaaacatcctgatgcttctcttgaagatttgatgaaatatgtaaaaggccctgactttccaactggtgctattgttatggggactaagggaattaaggaagcatataagacaggacgtggtagaattcaagtccgtgccaaaaccactattcaagaaattcgtgggcataggcaagaaattgttgctacggaaattccattcgatgttaacaaagcactattagtaaaaaagatagatgaaatccgtctgaataaagaaattgatggaatcgcagaagttcgtgatgaaactgaccgccatggtttgtcaattgtgattgaattgaaaaaagatgctgatgcgcagaatattttaaattatttatttaaaaatactgacttacaagtatcttataacttcaacatggtcgctattgatcacatgactcctgttcaagttgggctaaaacgaattttagcttcttatttagaacatgaagaagacgttgtaactaaacgtacgaaatttgacttagataaggcagaagctagattagagattattcagggcttgattcatgccatggatattttggatcaagtaattaaaaccatccgcgcttctaaaaataaagccgatgctaagaagaatttaatagctaagtataataaatttactgaaaaacaagctgaagcaattgtttctttacaactttatcgtttaactaatacggatgttaatgaattaattgctgaacaagacaagttaaataaattggccgaaaaataccgtaaattattatcagatcgtgcaactttagaaaaagaaattattaaagagttaaatgcagtcaagaaagaatttgctaatccacgtcgaactcaaatttcagaagaaagtgctaaagttgaaattgatgaaaaagccttagttgctgatgaacaggttagagtactaattagtcgagatggctatttaaagcgttcatctttacgttcatatcagtcaactaatgatgatgacaatggtttaccagatggtgacaaagtagtttatgaaaacacactatctaccctgactaacttgtatttatttaccaataaggggaatgtcatttatcgtccagtacatgaactaattgaaaccaaatggaaagaaacaggacaacacctatcacaagaaattggattagacagtgatgagcaaattattcgcgtctttgtatttgataaattgaatactgattgcaactttattctggctactaatgacggttatatcaaacaattggagttagctaacttacagccgacgagaacttataagtcacgtgcaatgacagctatcaagttaaagggcaaggatagttatgtagttggggtagatttgatcaaatcagataatcataaggaaatcacattatttactcatcgcgcctatgcaattagatatgatgttagcgagataccaacttcaggagctaaagcagtaggtgttaaatctgctaacttgaaagatgacgattatatcgtaaattatgtcctagttgattctaagtatgttgatttaatgcatgttgggctaattactcaacgtggggcatttaagcaattcaaacttaaactagttaataaagtttctagagccaagcgaggggtactagtactgcgggaattgaagaataaaccgcatagaattgttgctctaatgccatatgctcaagatcatttgttacatgtcactacttctagtgaccgtcatgtaaatattaaaactacggattatccattaggcgatcgttattctaacggctcatttgttattgatactactgttgatgggacgcctgtaagtattgaattgggaagacccattagtagtcaaaattaagatttgagtttaactaaaacaatatattaatctttaaaaacagtgttaagacatatgttttgacactgttttgttttggatagataatagcagtgttatgggacatggcttatcgtaaaataatattttaggaaagagataatcgttatgtctaaaagtgatactattttatcggctaaatcattgcgttattttttacaattgattgagacgatgaattatacccaagctgcacaaattttaggtattacccaaccggctttaactcagcaagtaaaaaaattggaacgcgctattggtgctccattatttggacaaatggggaagaagttatacctaaccgaagctggtaaagaaatggaagcagcagcgatagagttgctaaataccattaatggtgttattagtgacattcaagaatatacccagtcagataaaggcaatatttcaattggtattctagagtccgtacatgttgatcttttctaccaatttttacgttacttcaataaaaagtatccagaagtaacttttactgttgattactttgaccgcaaagagctatggcacagacttgattccaatatgattgatatggcgattatgtatatgccagatactactaataaaacaggagctaatttccgtcatcaatacaatcatcgtgatatttgccctgagcatattgttgtactgactcacaaggataatgtggaagcaggagggacatattctgttactcgttttggcaacagaaagtgggttgcatatccggagaattactacttatcaagattaatgcgacttaactttagtaaaaagattgatctcgttactccgtttaaaattgcatctactaaggaaatgatcaaaattgcagaaaatactgatcttgatacttatgtagatcagacttactatgaggcgcataaggatgagattaatttgactcctgtttatattaaaaatatgcctgagtttacgactgcttgtgtttatcgtagaggaaaattagatgttcctaggatgaagaaattactaacggaattacagattttcttagacaataacttggataggaaccataattttagtaaactattaagtgaagaaattaaataaaataattagaaaaagaggcaatttatttaatggaaaaagaatttgtttttggacaccaaaatccagatactgatgcaattggcactgctattgcattttcatatttgcaaaacaagttaggttacaacactgaagccgttgccttgggtgagcctaatgatgaaactgcatatgctcttaaaaaattcggctttaaagcacctcgtgtaattaaagaagctgctccagaagttaaatctgttatgttggttgaccacaatgaaccacaacaaagtgtttcagatattgacaaagttaaggttactcatgttgtggatcaccatagaataatgaattttaataccgctgatccattatattaccgtgcagaacctgtaggctgtacttcaaccattgtttggagaatgttcaatgaatttggcattgaaattccagaaaactacgctggtttaatgctttcagctattatttcagatactttacttcttaaatcaccaactactacagataaggataaaaaggctgtagaagcattggctaagattgctggcgtagattacaaggaatacggcttagcaatgcttaaggctggtactaacatcagtgacaagtcagaagaagaattgattgatttagatgccaagagctttgaattaaatggtcacaacgtccgtgttgcacaaatcaatgttgttgacttacctgaagcgttagaacgtaaggaagcctttttaaaggcaatggatgcttcatctaaggataatggctatgatatgtttatgcttttaattactaacattcttgactcagattcagaagctttagttgttggctctgatgagactaagtcattattcgaaaaagcatttaataagcaacttagtgattcagaagttgaattacctggtgtagtatcacgtaagaagcaggttgttccacctcttactgatgcttttaatgcttaaaagtaatgatgtaaaaaataggaggtagggttaaccgcctcttattttttacctaaaaattaaaactgattttaggagaaaaatattgaaatacccacaattaaatttagaaaatcaacagggaccaacagctgtattgaaaaccaatcaaggtgaaataaaaattcaactttttccagaacaagccccaatgacggttgaaaattttattcgtttagctcaaaaaggctattatgatggtactatttttcaccgcgtaattagcgattttatgattcaaggtggagatcctgaaggaaatgtcactggtggtgaaagcatttgggggcatccatttgaagatgaactttcacgagaactttttaatattcgcggagcattatcgatggctaattcaggccctaacactaatggtagtcaattttttatcgttcaaaacaagaatatgcctaagcgttacataaaacagatggaacccgcaggctatccaaaggaaattattcatgcttataagcaaggcggaactccatggcttgacggtcgtcatacggtctttggacaagtaattacaggcatggatgtagttgataaaattgctaagtcgaaaaaagataaaatggataaaccactagaagatataactattgattcgatccaagtccaaggatcaaagtttgatgactaacaaaaacgtgctgttttttcggaataaacagcacgtttttgttaattattcatttcttttagaagggtgatcaaagacttacatacgcgttcagccttaggttctggtaattttcttaattcgttaataacttttttcatgaaaacgggtgtattgttatcatgaattttttcaggcttgatttttttagcacgataggcattgttaatgatatcgggtgtagtagtattcaaagctttggcaatagaatcaagcttctgaatactaatgttttggtccttagtcctttccacacgtgaaataaaatttacagaaagatcacttagctcagccaaatcttcctgtgttagtttctgttcacgtcttctacgagaaatttcttctcctaaattaatattcacaagcattcgatcctttcaagtaacttatagcctatataaaattatgtaaaaaatgaatagactattttaatattctcaacatacacttatattaaataataagaaattatatttgtttataaatgtacatttttagcgtaatcagtgctattaggcactacagtttagaaactgtcaaatcttttgtgtaaatagatctttctcgtaaattgattttttaattatttatttaatcaaagtaggattctaaggtgtcctgaacctgaccaaagcctttatgaattcgattgaaataacggtcattgtagctcattgcctgaatgccaataaaagcatcaagcgactgttcagttggaaactctgccttaggcttagctttgcgcttgatcacattgttaaatgattcaatcatgttagtcgaataaattgaagctctgatctgcttgggatagttataaaagaccagcagatctggttctatgtctttcaagcttctgataacatggctgtaaaccttgccccatttggtatagaagtcatgcaggacagctgtggcttcttctttgtttgtctgttgatgcacctgtttgaattcgttcatgatcttttcacgatcgtcgacgcgtactttagcgcagatattgcgcatgacatgaaccaaacagcgttgaaaatgagctttaggataagtcctggccaaggctgttttcatgccaacaacaccatcagaaagaaaaagctcaacttgctttaagcctcgggatttcatgttttgaagcatatctgtccagacttcaatgttctcgctaggtgcaatgcagtagtcaatgacctccttgtgcccattaggcttgatgccaatggcaatatagactgcttcacgctcaaatgtttctcggcgcaaaggaaggtatgtcgcatccaaatagacgcagaaaaacttgtcgcttagcttgcgtttgtggtaagcctcaacctttggaatcatctgcttggaaatatttgatacctgagctggactgtaatggctgccatacatcttttcaattagatcggctatttccctggtggtcacgcccttggagtaaagcttgataatcatgctttccaagatatccgagtgctgcttgtagccaggcagcgtgtgctgatgaaattgaccgttgcgatcccgaggcacttgcacttcaattgggccaaattgcgtatcaactttgcggaaataagcaccatttctagagttgccagtattccagccatttctggcatagggatcatagcccagaaaggcagtcaattcagcttctaacaagttattaacagcctgttgtagctctttgcgcaataaatcatttattttgtctggattgaatagagcttgagcaaaatctttggtaaaatcattcatgaaggagttcttctttctgtatgtgtttttttgttcaaaccaatcatacgagaaaggaactcctttttctaatgtttaaagaaataaatttaaggaatcattcatccttacacaaactattttacagtctcacagtttatagtatagtcttaaattgaatacttttattgttaaaatagaaatgaaataaaagctacctgaattgtcaaattaagtgcaacagttaggctatgaggaaatatattgcttgaagagttcttctgctgtgtgatattggaggattcggcgatatttgtggttaatggcatcagttgcctgttgaacataagcttttgacttgtctttcatgctcttgcccttagggaagaattgacgcaaaagaccattgcagttctcattggtgcccctttcccatggagaatatgggtgagcaaagtaaatctggcagcccttgatcttggtcatatccgcaaactcagagccattgtcaaacgtgattgatttaaaccaggcaggatgtctgtcaatctccttttgaagcagcctttggcatgtgcttgcccgatagtcaggaatcttgataactacttcaaagcgtgtggttctttcagtcaaagtcattaaagcaggctgattcttgcgtctgacgcctttaaccagatctccttcccagtgcagcggagcttttctgtcttcaatctctttaggacgctgttcaatggaattgccaagatgcttcttgtgcaaagcgtgaccgccatggctgtgatgacgcttgttcctgcgtcttttgagcttcataggcagatcaatattgcttatgtccagcaagccctgatcaatatagcgatagacagttggtgtgctgggacaagggtagcctggcatagtccttttgaattcaccaacgaactcatcgatgctggtggcatcaaatttagctttaaagcgtctggagagcattctcaaaaagacagcataatgcttcaatggattgcgctgatagcagtttttgcgacgcttctcataataaatctgtgcagtatcagcgtaatagtgctcatacaataaatagctgctgtctctttgcaggacacttccgcgtttgatttcgcgactgattgtcgacttatggcagccgacttcttgagcgataacagtacgggaagttatgccggaatccagcattgcttgaatttgtccacgttgtacgctggttaattgatgatagtgcttagaaatgctagaatttgaattggtcataaagatcttcctttcttgatttttcgtcacttcaagtttaggtcttcatggcctttttgtttaacacttagtgttgcacttcaattttaaatccggggaaataaaagctaaaaaaaatatactaattattaagtttttaagcttataatgtatacaaggatataaaaatagattggggatttgatgagtttaaaagaggttttaaatagtaatcggcctgcagagtcacgacaattagcgtgtgcgttaactttttgtgggggatttattgatgcatatacatatatccagagaggacatacgctttccgctggacaaacaggaaacgttatcttttttagttcagcattagctgatcataatgttcctggaatgattaatcgagctagtacgtttattgctttttctttaggattgctattagtaggactttttcataaatatgtgaaaagtcactattggagagtattttgcttatttccaattttagcgatttgtattgtagtgggctttttgcctaaaagtgttcctaattattatattgtgcctgctattgcgtttggattggctattcaaaacgcatctttcagcaaaattgaaggcatgggttataacaatgcatttacaactggaaatttaaaaaaatcggttgttgcatggagtgcatttttttttggtgaagacaaaagtaaacatacagctgccgttaattatatgatgttaacaattgcatttgcagttggagcaataatttcagctttactgcaaaaattattggtattaaaaactatttggattgcagtcatttttttaacgacgattaatttagtttatatcattgcattgagacgaaataaaaaaattgatttttcaaaatgattttaaaagcacttgtcataattggcaagtgtttttttgaagaggttgtgagtgagaagaaagcgaccaatctgaaaaataataattttataagtgtgcgtataattaatattatgtaaagtcagattgaaaaacaatcaatttaataatagaagtcataattaatttaattgtttcagcaaataagtcttattttggatttgttaactcgaattcagagactgtaaaatagtttgtgtaaggatgaatgattccttaaatttatttctttaaacattagaaaaaggagttcctttctcgtatgattggtttgaacaaaaaaacacatacagaaagaagaactccttcatgaatgattttaccaaagattttgctcaagctctattcaatccagacaaaataaatgatttattgcgcaaagagctacaacaggctgttaataacttgttagaagctgaattgactgcctttctgggctatgatccctatgccagaaatggctggaatactggcaactctagaaatggtgcttatttccgcaaagttgatacgcaatttggcccaattgaagtgcaagtgcctcgggatcgcaacggtcaatttcatcagcacacgctgcctgactacaagcagcactcggatatcttggaaagcatgattatcaagctttactccaagggcgtgaccaccagggaaatagccgatctaattgaaaagatgtatggcagccattacagtccagctcaggtatcaaatatttccaagcagatgattccaaaggttgaggcttaccacaaacgcaagctaagcgacaagtttttctgcgtctatttggatgcgacataccttcctttgcgccgagaaacatttgagcgtgaagcagtctatattgccattggcatcaagcctaatgggcacaaggaggtcattgactactgcattgcacctagcgagaacattgaagtctggacagatatgcttcaaaacatgaaatcccgaggcttaaagcaagttgagctttttctttctgatggtgttgttggcatgaaaacagccttggccaggacttatcctaaagctcattttcaacgctgtttggttcatgtcatgcgcaatatctgcgctaaagtacgcgtcgacgatcgtgaaaagatcatgaacgaattcaaacaggtgcatcaacagacaaacaaagaagaagccacagctgtcctgcatgacttctataccaaatggggcaaggtttacagccatgttatcagaagcttgaaagacatagaaccagatctgctggtcttttataactatcccaagcagatcagagcttcaatttattcgactaacatgattgaatcatttaacaatgtgatcaagcgcaaagctaagcctaaggcagagtttccaactgaacagtcgcttgatgcttttattggcattcaggcaatgagctacaatgaccgttatttcaatcgaattcataaaggctttggtcaggttcaggacaccttagaatcctactttgattaaataaataattaaaaaatcaatttacgagaaagaactatttacacaaaagatttgacagtttccgaattcaggttatttattttttcaaaaatgaattttgcttttttaatttttgtttttacttcatttactctgactatgataagaaaatcaactctcaataaatttttacatgctgagatcgcaattctatgaccaagttcatttattttgatcaatagttttatagtttaatagttagttgttcatttgtatgaaccagtttttaaaagtaatggttttattgatggttggaattatagtttttcatcaagttaatcaagctagataaaattacttttatggctaagagtaaatcaatggtatcctagatattcttgaaataattttttagatgattagttatctgtatattttatggctaaaagtctgaattgaataatatgctgacaataatcaataaaacaaccttcaaagagaagtattttgaaacaattatggtaaagtaattctaattaaaaacaatgaaaatagttgagtaatatttgctagttttgcctttagtatctataaagccattttttatttttatgctatagctttctttaaaacaaaaattttaatgatcgctagataaacctatctcgcaaaagcctaattttggtaaatttgtgcttttgttatttttattgttttaacgttttgtatttcattttaaattcgtaaaaaaatattttataaattctttgctctttttgctacatacaaatcggtattaagtgcttttatatttattcttattccctatttttaagatttgctgcaataatacacatattgaaatttcttaaataaataatcaagcggtaaaaatgataattctactaaactcatgactcaagtcgctacttaaatctgtgtttttacatgaataagacatctaaataaagtttcaatcttcaaaaaatgctgagaatcactctaagatttctttttaatgaattaatttatcgtggttactcaatctttatacaaacaagcaacattttaattcattattatacctctatctcccctcctctgctgaccagggaagacgaaaaaagagccgaaatcagacataattcgtccaatcaggctctttgcttatctagctagaataaaaatctgaataaactcaatctgttgcaggtctaattttattcataatgaaggcaacgacgattaccaagataactgcacctaaaattgacggtacaattgccatgtccgcaaccttcggtccccattcccctaaaagggcttggcctagtgaagatccaaccaatcctgctaaaatattagcaatccagttcattgacttaccatgtccagttaaagcacctgcaattaagccgattactccaccaacaattaatacccaaatccaatgtagcattttgatcacatttgctttcttgcaaaatatcttatcacatttctgattaaacaaagcgctttctttaactatctttattttgagactgtaaaatagtttgtgtaaggatgaatgattccttaaatttatttctttaaacattagaaaaaggagttcctttctcgtatgattggtttgaacaaaaaaacacatacagaaagaagaactccttcatgaatgattttaccaaagattttgctcaagctctattcaatccagacaaaataaatgatttattgcgcaaagagctacaacaggctgttaataacttgttagaagctgaattgaccgcctttctgggctatgatccctatgccagaaatggctggaatactggcaactctagaaatggtgcttatttccgcaaagttgatacgcaatttggcccaattgaagtgcaagtgcctcgggatcgcaacggtcaatttcatcagcacacgctgcttgactacaagcagcactcggatatcttggaaagcatgattatcaagctttactccaagggcgtgaccaccagggaaatagccgatctaattgaaaggatgtatggcagccattacagtccagctcaggtatcaaatatttccaagcagatgattccaaaggttgaggcttaccacaaacgcaagctaagcgacaagtttttctgcgtctatttggatgcgacataccttcctttgcgccgagaaacatttgagcgtgaagcagtctatattgccattggcatcaagcctaatgggcacaaggaggtcattgactactgcattgcacctagcgagaacattgaagtctggacagatatgcttcaaaacatgaaatcccgaggcttaaagcaagttgagctttttctttctgatggtgttgttggcatgaaaacagccttggccaggacttatcctaaagctcattttcaacgctgtttggttcatgtcatgcgcaatatctgcgctaaagtacgcgtcgacgatcgtgaaaagatcatgaacgaattcaaacaggtgcatcaacagacaaacaaagaagaagccacagctgtcctgcatgacttctataccaaatggggcaaggtttacagccatgttatcagaagcttgaaagacatagaaccagatctgctggtcttttataactatcccaagcagatcagagcttcaatttattcgactaacatgattgaatcatttaacaatgtgatcaagcgcaaagctaagcctaaggcagagtttccaactgaacagtcgcttgatgcttttattggcattcaggcaatgagctacaatgaccgttatttcaatcgaattcataaaggctttggtcaggttcaggacaccttagaatcctactttgattaaataaataattaaaaaatcaatttacgagaaagatctatttacacaaaagatttgacagtttctttattttaagcgaatgaactatttcttgtcacttttaaaatatattatttgactgtcttatacttttctttagatttggggcatatttcttgccacgactaattctttattttttgtctattgtatatctcaatttgatttcaatttttttcggtttgattactgatatattaataaatgatctcatctattgccttttgagaactatatctgtagtctataaagtataaattatgtgagagatatagataagattctctccactaagtatggaggacataaattgtttaaaaggaaatcaattattaaattagcatgtgcaactatgttaacgaatgcaggtgtcacacttttatctcaaatgactcgtttctctgactcagagagcattgtgcaagcttcatcaacatcagttgttgctaaagcccttggaattgatgttgccagctaccaaagcgcagatttaactgctcatgccaaggctggttctcaatttgcaatcgttaaagttagtgagggaaccagttatcgcaaccctaaggcagccaatcagattaaatctgctattgctaatgatatgatgccgatggcttatcattttgcaacttttagttcaagttcatcggccgctaagcgcgaagcgcaatacgcaatttcttctgctaaggcgttgggattaccagctggctcatacttagcctgcgattatgaaactggtcagggcaatatcattactaatggtaaaaatgtgacagctaaggctattattgcctttatggatcaaattaaggcggctggctatcaaccacttctctatgctagttcttccgttttgcaaaacaatattaatactccatctatcgtgaacaagtatcctaattcactctgggtagccgcatatgcgatttcaggccgagtagaccaacccaactttaaatacttcccttcaatggatggtgtcgcaatctggcagttcacagataattggcgcggaatgaatactgatggcaatattacagtcttgccattatcaatcgcaggtaacgcggcagtttcacaggctcctaaggcttccaataccaagaaaacagctacagttatgtacaagtcatatgtttatgacaaaaatagcaaccggacaaatgatttttataatgcttacagctctattgcttattatgacaataaggtgagaattaaaggcaaatcaatgattcgtgtcggtgaagacaagtatgtgatggcaagtaacgtactaggcaattcacgcgtctttaaagctgatgctaaagtgtataaaaatgatggcaccattaatacaaaatggtctactaaaaaatccggttcaccgatcaagacttatggccctaaacattacatcaataatgaagcttactatcgaattggtaaaaatgcttacgtcaaagcagacaagttctaatttatttttagcagcaaatatttgctgcttttttgatgcatccctaaaacgtaaatgaactgacaaatcatttccaatttatttatctgcatcccttttttatccatgttaaaattaaggcattatatagaaacgaggataagataaggatgaaatttaaaaagaagttagctttattcttaggtctgggagtattattgctttctctgactggttgtagtgattttcaaaactgggaattatctatgcgctctaagattggggcattgcccttaacagtatcaacgtatgattctaatggacaaaagatcgaccagatcaaagctaagtcagttaatattcatactgataaaaagatgtcacagaaaagtagtaatggcactgaacattctagcgtaattgatgttgactatggcaataatcgaatgattcacgttggttctactatgattgcctatgaaggactgaaaaactacgaggatgcatttaacaaaaaagttaagatcgacgatcaaaatcgttctgttcctctgttaaatacaatgtatcagaattttaaaaacgattggaatggtagctcaagagtagtaatgattagaagccaattaggaatgccgattgctgtctttattggaaatcacgtctcaattcataagagtgatatgaagaatgcaactcaatttgtgattgatggtcatcgtctatttgtttaccgtgctgattacacagtttatccaatgtccagtttaaaaagcaattaactataaaaagtgtcaatcctcattttaaggactgacactttttattatttatcatcaattaatgcattaaatgcttcattagtttcaacgatgtcgctcattacttgattaatccagtcattaagcttatcgttatcgtagttttctaaaccgccttcggaatctccaatgtccgcaataccattattgaaatctactagttcagtaattaacttttgagcaaaaatcttagtggtaccaccaaagtttttcgcaaaattatttacatccccatatgcatcggcaatatcactgaaaactgtgacagttttaccaaaagtctcactcaagttatctacatctgcttgagttggtacagtcaattcttcatcttcattattaagttgttcatctaaacgaacgccaatgtcgtttaacactaagtgaccatcatatagacgattcagtaatttgataccactagggtttttagcttggaagtttacactaatttcttctgtcatactttttcctcatctcacataatgtattttcatctattgtacaatttttagccaaaaaatacgactaaacaaggaaaataagcttttttcgattctttataaaaaatgttatattttacttgaacattagcaataaagagcataaaataaacgattgaaaagtgttgtaccatacaaacaacatatgtttgtaagtaatgtttgaattactaaatgtaatttgcccttacttactgacgagcaatcactgttgctataattagaatgctaagagttttctataagcgttgctggtattctagttatagtgacatgattatctaagttaaatttagttgcaatcatttttctacgttagtactatagatattcacgttcgaatgagcgcagtaattttaaattagactgttttttatcacctattcctgagaataggtgatttttttatgattaacgtatttgtatgatataatataaacattagttcgcaaaaggagtagatatggaaactgctaaatacctagaattgatccaaattgaagtaaataaattgcctgattttgttaagcaatttaatcttggtactaatcattcattaactactacttaccagtacttaactgaaattcgacgcttcttcgattggctacgtcaagaaaatatctcttctgcttcagataatgctcatgttactacggatacattagccaacttacgtcgcaatgacataatgctgtatattgattatttaggacatacccgtaataagcaaggccgactaaactcccccactacgattaatcgctcaattaatgctttacgctccctatttaagtttttaaccattactgccgacaataatcatggtgagccatattttgaacggaatgtaatgcttaaaattaattctttaaatgatacgcaaacacttaattatcgggctcatgtacttgaaagccacatgtacactggtaagttaaaatttgaatttttgacttttattgatcaggactatattaaccattgtaataagcaagcaaagattggttttaagcaaaacaaagaacgtgacatggcaattgctgcattaatcttaggtaccggcattcgggtgtctgaatgtgctggcgttgatttgagtgatttaaaccttaaggatgctgtactagatgtaactagaaaaggcggacaaaaagatagtgtaccaattgcagaatggacacttccttatatcaagcgatataaaggtattcgtaatgaacgctatcatgcagatagtaagcaagtggcattctttttaactcaatggcatggtcaaacgcggcgaattacaactaatgcaattgaaaaaatgatcaataagtattctgcagcttttggtcatccccttaccccacataagttacgtcatacggttgcttctgagctctatgaagtaactaaagatcaagtgcttgtagcacaacagctaggtcaaaaaggcacttcagccaccgatctatatactcatgttgatcagaaaaaacagcgtgcggctctcaatgagatctcaaaaaaaaatcacgattaatcaaattaaatgcaaaaacgagtttggctattcaattccaaactcgttttttattaatgtttcaatttcttgtaagcttttttggagccacgatctagatcacgattaaacttataatcttgccagtctttaacaaagagtaaatctaagttatatccttttgggtacaagtctttagctagtcgtcttaattgtaaacgtctgagtggtacttctacaaattcttttgtcacaaatatctttgctgcattttgggtaggaagatatttataaaagattccttcttcttttaaattggtagcatatacaatatcacctttatgaaattcttttttaacaaccaggttgcttttgtttttccgctggtgaacgaaacgtttttttaaagataaaggtaaattattgcccgctaatatggcttctgcttgatgcaaaacattttctggaatacctgattttttggcgatccatagtgctcgactattaccaatacttcctatctttaacttataagtaggttgcagattttttaagtcaaaatccattgcagctgtgataaaaccatcatgctgcttagcaaaatccttaatagagctgtagtgtgttgtggccatgattaaacagccacgtaaatacaactcttgtagaataccaatagcgagtgcgcttccttcatttggatctgtccctgtccctaattcatctaataatactaaactatggaattgagcatatttggtaatcatggcaatatctttcatttcggctgaaaaagtactcagagaattatctaggtcctggtgatcacctattaaagtaaaaacgtcatccattaatggaatatcacatggtttatcgcttggtaaaaacagacctagttcggtcattaaaatcatcaagccagtagttttaagcgcgacggttttaccaccagcatttggtcctgtaatcattagaacactattttcttgggttaattctaaggttaacggaacaggattaatgatcaagggatgccgcactgcacgtaaaacaagagaattttcacgattaattttaggcctaatacaattatatttttgtgcaaactttcccctagcaaaaatcatatctagtaaagtgattagttcaatgttacgcttaatatcatccttcacgtcgtatatttttgcagttaaagcacctaagattgctagttctagattacgtatttgtgcctttaaattggttatttgctgatttagacgaacaaccttagcaggttgaaagtagacggtttgtccaccattagaaacagccacaatagtccctgacaattgatttttgtagtttgctttaattggaatggtagcgtagccctctttttcaacgatcattgcgtctctaatcattttttgattaggtttactagtcaaaaaatgatttaatgcagttttgagttcagtaacagatttctttaagtcgcggcacatttttgctagttcacgatctgcctcatcgcgtacttgaccatgttcaatagtagtataaatagcatcttcaatgtctggcaatagcgtcatgtcttggacatatgcattgagtaatggtgctagctgctcatgtctggctaaaaagcgttgtagtaggcgatttactcgtaaaaattctgctactttttctagatcatcaggagttaagattagtcctttttcagctttagtaattaaatgctcgatatcctcagaactggcaaaaggaatgtgctgccgtaatttcaaaatcttcacggcttcttctgtttcattaagcagttgttctactttatgtaaattgctacttggttggacggaacttaattgttctttggcagcaatagtaattgcctgttgagctaagatatctttaacttgagtaaagtttaagttttgattattgttgatatttttcaatttgatgtaatttccttatgtttaatttaacgctgattgtaactaatggcttaataagtatgcttgcagacatatgcatttcctcgaatttctataatttgatttaaaaatgattgtaacataaaaagaacattaaaatatatactatagtaaaacagttattaaattaattcctatattttatgataaccatattactattgcctactatagcaattttgaaactgtcaaatcttttgtgtaaatagttctttctcgtaaattgattttttaattatttatttaatcaaagtaggattctaaggtgtcctgaacctgaccaaagcctttatgaattcgattgaaataacggtcattgtagctcattgcctgaatgccaataaaagcatcaagcgactgttcagttggaaactctgccttaggcttagctttgcgcttgatcacattgttaaatgattcaatcatgttagtcgaataaattgaagctctgatctgcttgggatagttataaaagaccagcagatctggttctatgtctttcaagcttctgataacatggctgtaaaccttgccccatttggtatagaagtcatgcaggacagctgtggcttcttctttgtttgtctgttgatgcacctgtttgaattcgttcatgatcttttcacgatcgtcgacgcgtactttagcgcagatattgcgcatgacatgaaccaaacagcgttgaaaatgagctttaggataagtcctgaccaaggctgttttcatgccaacaacaccatcagaaagaaaaagctcaacttgctttaagcctcgggatttcatgttttgaagcatctctgtccagacttcaatgttctcgctaggcgcaatgcagtagtcaatgacctccttgtgcccattaggcttgatgccaatggcaatatagactgcttcacgctcaaatgtttctcggcgcaaaggaaggtatgtcgcatccaaatagacgcagaaaaacttgtcgcttagcttgcgtttgtggtaagcctcaacctttggaatcatctgcttggaaatatttgatacctgagctggactgtaatggctgccatacatcctttcaattagatcggctatttccctggtggtcacgcccttggagtaaagcttgataatcatgctttccaagatatccgagtgctgcttgtagtcaagcagcgtgtgctgatgaaattgaccgttgcgatcccgaggcacttgcacttcaattgggccaaattgcgtatcaactttgcggaaataagcaccatttctagagttgccagtattccagccatttctggcatagggatcatagcccagaaaggcggtcaattcagcttctaacaagttattaacagcctgttgtagctctttgcgcaataaatcatttattttgtctggattgaatagagcttgagcaaaatctttggtaaaatcattcatgaaggagttcttctttctgtatgtgtttttttgttcaaaccaatcatacgagaaaggaactcctttttctaatgtttaaagaaataaatttaaggaatcattcatccttacacaaactattttacagtctcgcaattttactataacattcagcactagtatctcaactgtaatttttaattacaaatctattatcgtaaaaagggtaaacaaaaaagaccatagtttgtactatggtctatggctatttgttcttattttaattcgagcttatcaatatcaaccatccatgcaattgcaattgatttctctcctaagtgtgtagcgattactggactaaattcagctacatcaactggcttatctggaaagttttcattaacaaattgcttaatttgctccgcttgctttaaatcatttgagtgaaatacaaacaagcgtagcttatctttataaggcaaatttgctgtcttctctaaagttaatttttctaccttagaaacagcacgctttaatgatctgatcttatcaaaagcaacgatttttccttcatcattaaaagttaacaaaggcttgatttgaagcattgtcccaataaaagcaccggcattgcttaaacgaccaccacgacttaagtttttaagatcatctactacaaagaattcatcaattgtcttacgtatctcatctaacttctttaagatagcctctggttccataccattttttatcattcttgcggcagctaacaccaagtagccttgcaatctaactgtcatcttagaatcgtatggatataaattatattcaggattgttatgtgccatatttaccatattttgataaaagcctgagataccactggacaaagtgatagcgataatagcttcatagccttctccgtgtaatttattacataattctatcatttgccccatgctgggctgtgaagttttaggaaaagcagcaccttgtctctccatctcaaaaagctgggtggaagtgatactaacgccttctgaatattccttatcacctacgatgacaggaataggaactacattaatatcattatttttaacttcttgatcagttaagacactagtactgtcagtaactaatgcaattttcaatttattaacccttcccatatctaatttagcatagaaaaattatagcataaaaggcacctatcacgcaccctattccattttttctagggtcatagaagtatcagcgacttgatttaattgcttaataaataaattagcagcatctctgtcaaaatagacaaataataaattctcaatcttagtcagagttttttttagttctttagctttagtcacgccagcttcacttagattcacaatcttgcttgaatctttttccgatctagtgatattaataaagctcatagtcttcttttgctgcaattgacgacttaaggttgataatgaaatattaagcgcttctgccagcttccccatcgctaatgcttgatttttgttttcatcaaaaaatagcaaaattcgagtttgtgaaatatttaagccgcatttgtgatttatttcttttttcacttgatctgcgatcgtactaaaaaataatacatccattcgtatagtcctttttctccaatgtagattactatatacttgtattttatcatttaatatggcatttgataataccaaaaggctaatttatcagtaatattgtataatacaatgcactttttatgttgtaatatacaacttaatgatatagcagacctcgcgtgaaacatttactactgtattgcaggtttcaattatgattagctataacttataaatataatcattttagaatctgactaaaaattgatataatattacacgaactttgaggtgatatttatggcatttgatggattatttatccatagtttattaaaagacttagtccctactctggtaggtggtcgcttatcaaaaatttatcaaccatttgatcaagatctagtcttaatttttagaaaagatagaaagaattatcaatttttaatttcggccaatgcacaatatccaagaatgtatttgactaaacaaaacattgcaaatcctgataaagcacctatttttgtcatggttttaagaaaatacttagaaggttcagttttgcaatcgattgagcaagttggcttaggtcgaattgtcaactttcattttagtaatcgaaatgaacttggtgatcaagtcaagctcatgctttctgtagaattaatgggacgtcatagtaatgtcatcctttataatcaagaagacaatcacattattgatttacttaagcgaattaatcctgatgaaaatagagcgcgtgttttactgccaaaagcaaaatatgagttgcccccactaaaaccaggattaaatgggttgactctatcagaaagtgaatttaaacaattacgtagtgaaaaccagcctaatgaaattgctcaaaaaatggatggcttagataaagatgatcgaactgaattattaggctatcttgaagacgattacacttattcatcttttaagaccttttttaatcagtttgacaatccgcgtgcttttattttaaaaacacctagaaataagcgtaagattttttgttatttgccctatcatttagatttagagaaagaaagctctaatccagatctgaatgctggcttagatgaattttatgaatatcaggcaacacgtgattgggttaagcagcgtgcaggacaagttgaacgtgtagttaagaatgagcaaaataaactaactaagaaagttaaaaaacttgagaagcaattagatcttgctgaaaattcagagggctatagaattaaaggcgaaattttaaatgcaaatttggctcaagtaaaacctggaatgactaaagtttcattacctaactattacgaaaataatgctccattagagattaaattagatcctgctctctcccctgctcgtaatgcgcaaaagtattttactcgttacaaaaagttacgtgattctattaagcacattaatgaacagcttcgtattgctaaggatgatattcgttactttgattcaattcaaacagctattgacaatgcggatccacaggatattgatcaaattacagatgaattgattaatcaaggatatttacgtaaacaaaagaaaaataagcgtaggaagaaaatcattgaacgcaatttaaatgaatttaaactttcatctggtaaacacgtattggttggtaaaaacaactatcaaaacgattggcttactcttaaaaaagctaataaatctgattactggtttcatgttaagaatatgccaggctcacatgtgatcttacgcgatgatcagcctactgatcaagatattaaagaagcggctgagattgcagcttacttttctaaggctaaaaattccgctcacgtacaagttgattatgtgcaagacaagcgtgtgaaaaagcctaatggtgctaaaccaggatttgtaatctacactggacaaaattcaattgaagtaactcctgaagaaaaggaaattatgaataaaaaaattgaaaaataaaagtgtctgggaaaaaactagcttccagatgaataaaaacgatcaagatttccttttttaagaatcttgatcgtttttttgttctctttaaaatttttaacaataaaaatcggcccttcagccaccttctttgacaatatttgttcaaattcatcatcataaaggcaattccgatatcgatttcgaccttctctttacctcgcaggtgcgttctgcgcatgccaaatacgttcttcaaatgtccgaaaactggctctacatcatattttctcatgccatagatgtgtctgccttcttcgctttggagaacttcttttgctttttcttttaaatattgccagttaggattatagcgaacttggcgctggcggccgctagctgttttagccaattgttccaattctggcgttagctggaactcgtctgcctcataaaccttaaaatcacggacctgaccagtagaacgatccttacgctggctgtaatatttgaaattgaatctgacgccatgatgatcaatgtaataatcatctttttcattgtagtaccagttgattagcttagttggatcattcttatactttctggtctgttctttttcatacatagtgtagggaataaagtacttcttgtctggatatttttcctccagcatcgaataattgtattcactgccatagccagcatcggcgacgattttgtcaaacttgtccaacacggtcatttgatccaaaaccggctccaaagttttgaaatctgtcggattaggaaagatggcataatcaactacatattgatcggtcgtgactgcttgaatattgtagccaggctttaattgaccatttttcatgtggtcttccttcatatgcataaaggtggcgtcatgatctgttttggaataactgttgcgtccggcaaagatctcttcggcttcttcatatttttgcattcttggcacataatcttttcttagccggtgcagaatcttttttagtccacgtcgcttggcttttcgaggtgaaccgccaggaatggctttgttttcctgctcaatctctttagtcagcttgttaatttctgcttcagtttcttgagctaattcctttagcccctgactagtttgaactttttctttttccatttctttgactacttctttagtaatcaattcatcataaagttcaactgcctggcctttcagcttttcatgatacttttcaaccgctttgcgccagacaaatgtatagcggttagcatcagcttcaatcttagtaccatcgataaaagcagcaccttcattgattaagccttcatcttctaacaggttagtgaagtagataaagctctttttaatcagttcattggcatggctgcttgatctaaaattattgatagtatgatatgaaatcttttgctggtcagccaagatcatcattggcagattttcttccagcatcaactcaatctttctgccagaaaaaactcttctggagtaagcaaaaagcagtattttgagcatcatggctggatgataggctgggcggcccgttttagcagtcttgcctactaaaacatcttctggaattgaatctacaaaccagctgatgacattagccaaatgattggccggaatggcaaaatctagattaagtgttaaagcagtttgacctgtgatataattcttgtacatgttagtttccaccttttttattttgtgatgatttaataatatcaaggctggagctaaaagtatacaaaaagagcgttgaaacaaaaattcaacgttcttttttcatgatctgagacttagttttttcccagacactctcataaatgcaaagtcatatcgactttgcattttgttttgcttattaaataggttgagtagttaaagccaatgattctagaacgtctaaaatcaattccgctgtttcgatacttgagaaaacaggaatatgtgtattcagcgcttcatctctgatgcgcgatgcatcttcgctagctgcatcagacaaattagtaatattaacaaccatgacgatcttatgttgacgaattttatctagtagatttctagggtctttatgaaccttctccactactccagtagtaatcccagcttccgcaaacatattagctgttccttcggtcgcaattaatttgaaacccaagcgatcaaatcggcgagctagttgggtcacgcgattcttgtcttcatctctgactgaaataaagattgttccataacttggaatatgtaaatcacttgcttcatatcctttgtataaagccttagctagttgagtatctcgacccattacagaacctgaggatttcatatttgaatcgaaagtattaccacttgaataattaagaaatgaaaatactggcattttaatatgaataaaatcgctgttttgccatagaccattaggatatcctagctctgctaaatttttgccaattaaagcttctgtagcacaagtagtgatatccttatctagtgattttgataaaaatgctacattatgacctgcatatggtttaatttgcaatagatataggtcattatcaacgaataaatagtgcagattaaaaataccttttgttttcagctgcttaattaatttaattgactcttgctcaatctttttttgctgctcttcggttaaattttgcggctgaatcactgcaattgaatcagaggcatgcgaacctgtttgctctagatgttcaattataccgggcaaagttacattggtaccatcagagatagccgttacctcatatttgtgtccctcaataaagcgagaaatagttatttgatcaagttgattttttgctaaatatttctctattgcaggaacatcataaacaactgcagatttttgcttgttttctttattcataccaccaattaaaagtggaaaaccatatttagaagcaaaagcgaaaacctggtctgtatcagttgttttatttaatgccgggacccgctttaaggtagtagattgttgatcaagcaaagtagtaatcttatcccgcggatcgtcgtttgccttttgcccaataacgtgcaaaccacatttttccaactctttactcaatgcactgattcttttgccagaaaattgaactaatacatcagaaatattttctcttttagcaacagttagaatattttcaactgtaatggaatcaaaataaactcggtcaatattcttataccttgatgaaatcgattcgtcattatttgatagaagcacagtaacatagccatacttatgtaaagtatcggccgcgtgagcaatcatatagtcaaactcgctagtaaccgaaacttgaagcggcaacatgcccaaaatcaagatctttttttcagcatttaaagcttgtgcttcattttgaacatcatatgcactgtagtaagcacaaacattaggtttatatatacctgctgagccgtcgatcttcaaatatgatggctgcaagtcaattttattaatcaaagagcgaacttcagtaactgatttttgtaaaatcttagctaataatgggttaaagaatccatagactttagcttcttgcagcaaatcacgcgaaggctgctccttctcttgtaataactttttgccaagtcttacaatgtgaagcaatttctgataataaaccggatgcaaatgtgttactttttgtaattcagaatatggaatatcttgatcaattgcggctaataatttaactaaatgcaattcatcaggatgtgccaaatcattcaaaatatctgcagtggatttttctttttcttttataaaagcatgccaacccaattctaaattaatagttgcatctaagcctttcagaaaagcagtttcaaaattacggcctacacccattgcttctccacttgcttgcatgcgacttcctagcaaatagtggttatagccggattcagcaaatgaccaatatggcattttaattgctactgcatctaaggtgggttcaattgaggcattaagtccagatagaggatcggtaatctcattcagtcgataaccgatagcaactttgctaacgacatatcccacatcatacattccaattctttgagcccaaacagaacttcgcgtcaaacgcggacgaatcgtcaaaagcttagatcgaatttgagttccatggtgtttaatcgcaaaatgaaaactagcaaatccaatgagatcaagattagacatgatttttctaacggttattcttaactcttgaatatgatcattgtttagggttaatgatggcatcacaactgcagagtcacctgaattaatacctacagcttcaatagatcccgcaaaattgataaaagctaaattgccatccttatcacggattacgtcaacaattacttcttcccaactagataagtcttcagttaagcgataattcttccatgtaaaattatcattttgcttttcttctttaaagtaactgattaaatcggtaggatttgcaaattgcaaatgttcgttgtgtacaaaacggttgtacttagtaactaatacgggaaaagtgactttgtcgttaatgctttctagcgcattatctaaattatcctgaatactctgattaagttcccaagattgcccggtatcaatatgtagcttagtaagcaactctgtctttttctgttgattccccatttgtagagcacgcgaattcaatgttagtaactgaattcccatttgttctaaaacgccatcttgtaataacttatgtgcaacctttaaaccattagttgaaccataagctgtcataattgcatctggctcttccatccgtagaattcttttcaggaagtcgagagtcatcggttcaagatagactgttacaccaagttttttatcagttgaaattgtagctggattaggattgactagcacaacttgaatgccttcttctgtcaaagcatcaattgcttctgttgccataagatccatttctgctacactaccgattaaagtagggcctgatccgataattaaaactttatctaaatcgttttctaatggcatataactaccccatcatctgtaaaaaataatcaaaaatttcatctgcatcattagtgcctggtgctccttcaggattaaaagcagtggcgatcaatttgtccttactgttccagaagcccgccatcagttcactgtgtagatcaaagtattcacgattcatattcatcttcacactatcaggcaacactagttggtcaatattcatcgctgtttgccagatagcattactattttgttcaatcactggataattaataccatcaaattcttgtggtaattgaaccagttcaaagccgagataatcgctcaaagttaaaaaacctaatccgattcctaaaattggatacttaccataaaaatgatctaaaactggcgttagctgattaattacttcttctggttttcctggcccatttgaaataatcattccttcaggacgtaagttttcaatatcaatcggactggcactgtatggtaaaactgtcgtatttacttttcgtaaagataaagcacgcagcattgagtgctttagcccaagatctagcacagctacaattcgtccaacattaggggatgcatatgcattcttagttgaaacagtcgcagatttatttttaggtaaaactagtgctttaatctgatcaaaggcatgctcgtcattagtatccatgatcgaagccttaattgtaccttcttccattaagcgatgaactaaagcacgagtgtcaactttgaaaattgcagggatgttcttttctttcaaaaaagaacttaaatcttcaaaattttcactatctgaaatatttaatgcaatatcgttagcaataatccctttaactacgggatcaatactttcataatcaatggcattaataccgttattaccaatcattggtgaagtaaagactaaaattttaccagcattagtaggatctgttaatgcttcttggtagccaaaattagccgtttgaattgctaattcaccggttgaaataatactggcaccaattccttcacctggaaatgaactgccatcttctaaaatcaaataccgtttcatattatcacttacttgtttgttctagttgagccaacgtttcttgaaaaatttgtggtggttctacactaaactctagccattcgccagtacttggatgtttaaatcctaatactttagcatgcaaaaattgaccatgacctttcaaggttttacgtggaccgtataatgggtctcctgcaaccggatgtccaatatagtcaagatgaactctaatttgatgggttcttccagtttcaagctgacactcaattaagctataatccttgaactgctcaagcaccttgaagtgagtaatagcttttttgcctgtttcaactaccgccattttcttgcggtcatatggattgcgaccaattggtgcatcaattaccccattttcttccgcaaaattaccatgaacaattgcccaataaagacgtttgttagtcttatgagccaattgatcttctaatgattcacgagccttggcggtcttagcgatcattaataaaccagatgtatctttatcaatccggtggacaattccaggacgaaatccttctggtgattgtgctaaggccttggtgtgatataacaacgcatttactaaagtatgatctggatgacctggtgcgggatgcactaccataccttgaggcttgttaactacaatgacatcatcgtcttcatacacgatatcaagtggaatattttcgggtataacatctaacggtttaaccgctggaatattaacttcgattttatctcccgcctgaatcttataagatactttttcgactttgccattaactaggatattttggtctttaaccagttctttaactctagttcgagatagatcaggaatttgttctgaaacaaacttatctaaacgtcccttttcgttttttacttcaagtgaatattctttagtcatgttgttcttccttaccttcaataaaaattaagtaaatgaacacaaggattactccaacagtaattgcggaatccgcaatattaaaaatgttgaagtgaacaaaatcaagctgaagcatatcaactacatattttaaatgcaaacgatcaataaaattaccaacaattccacctaagatgagggctaaacccacatcaaacaaggtattcttgtactttttgttaaaaagaaaatacaagcaaacactaatggcaataatactgataatgtaaaaaagccacatttgaccagttaaaatgttccaggccgcaccattattttgcaaataattaaaggaaagaagcccaggaataatctggtgtacttctcccacagcataatgggcaacaatataattcttaagtccttgatcggcaagaaccacaactaatgaaataattaaatataaaaactgcatatctttttagaataatccgctaattttaccattgttatcaacatcgatatctagggccgcaggatgcttaggcaaacctggcatatctagcacatgacctgtggtaaccacgataaaatgcgcaccattttttaaactaatccctttcacatgaagcttaaagtcagttggagcacccaattcgttcttgttgtcgctaaatgaatattgggtcttggcaataattactggtaattgggccttacctaactttcttaattccgcaatttgcttttcagccttgtcactatattcaactccagctgcatgataaatcttggtagcgactttctcaatcttgtctttaacatcgtcatcatctgcataagttggagttaaatctgccttgccagagttagccaaatcaacaacagcttgagcggcttctacaccacccttagaaccttcgccatgataagtaactacttcagcattaataccttgttcttcaattaattgtttaagcaaagcaagttcttggtcagtatctgaagcaaaacgattgattaacacgatgaccggcacattgtatgaacgcatgttgttcatatgacgctcgaggtttttaaaaccttcttttaaagcatctaggttttcttcatctaagtgatcagttgagcctaaagcttgatacttcaatgcacgaacagttgctacaactactgcagcatcgggcgtcttgtccagatgtcttgagacaaagtccatgaacttttgcccaccaagatcactaccaaagccggcctcagttaatacatagtcgcttaaatgcaaagccaagtttgtcgcaatgacggaattggctccatgcgcgatattagcaaaaggccccccgtgcactaatgctggtgtgtgttccaaggtctgtactaagttaggcttcagcgcattagacaatagtgcagcaattgcaccttggaatcctaactgtttaacataaaccggttcatcatccttagtgtaaccaactagcatgtcaccgattctactctttaaatcgttaatatcagttgccaagcagagaatcgccatcaattcgttggctacagtaatggcaaaactagcttgatgttcaacaccattaaacttggagccttgaccaaccgtgatttttcttaaagcacggtcattaacatcaagcccacgcttaagtaaaattcggtcaggatcaagatttaggctattgtcttggtagatgtagttatcaactaaagctgcaagtgtgtcaattgcggcagttaaagcatgcatatctcctgtgaagtgtaggttgatatcttccatagggatgatttgtgctttcccaccacctgtagcaccgccttttaatccaaaaacaggtcccatcgaaggttcacgcaaggcgatcatcgtattctggtgcaactgattgtgaattgcatcccccaagccaattgtaatcgttgacttaccttccccagcgggagtaggagaaattgacgttactaatactaatttacctaactttttactagcacgagtcctgttaatggcttgccaagtaatcttagccttatcatgaccataaggttctaagtcttcctctttcaagcctaccttagcggctatttcattaataggtaattctttggtttcttgtgcgatttcaatatctgatttcattattgcttattcttctttctagacatcattaaaacagaatagctttggtaatcactttttagttgataaacttgaaaattacgccaacttgaaagcaaagtcatttgattgatttttacttttgaacgatatggcaacttgagtaatattttgtctccacccttttgcaagtaagaaaaggaccaagtataaactgctaaaagtaagaaaatgataccaactactattccaggtatactaattgctttgttcccttcatagcccaaaataaaggcgataaatagaacgattaagagccaagaataatagataattcctgcaactcctagaaacatgaaatgccgtttagattttagaatttagatcacaccctatttatttaatcatgtctattgtatcaaagatttaatcaaaataagagggttgaacttacagcgtaagtgtcaatgtttttgcggtagcctttaaaccattagtctaaccttaatttcttaaatatttatatgacttaaatttctgcttagcttgcttaaataactattgccagctacctgtgcggttaatgcgccatgctggatgcctaaatgaacttcatgacgcttctttaagctgtcacgggccgctgcttttaattcctgttcagtcaatacagttatttctgaatcttcaaactcgctgctaagccaaaattccagctctcgattcttgatgcagcttaagatcctaagcatgccttctgctccagattttgaccatttcttgccttgccccttaacacggtaggtatacttgcggtggttgctctcgcagcagccaatggctttagtcacagtcagttttcgtttcttaaacggcttaatatcgtcccaatgacgatcaatataattccttaggcgccccagataatcatgattgagctcggtattcaattcatcaattagtcggctttctgcagtggttaggatagttttaactttgtcatagctgtatttgtattccaaagcagaaatcagcttgccttgcaggtcaggcgcaaaatatagcctttctttgattttcttatttaggtgaaagacatccaagaaatgctcatgacgcttgcatagccctacaatgtcatcgaagtctgttttggcatatccagcaccgccatcggcgttgctaagaattacagtatcagaaagatcataagtattggccaggtactccttggcttcgttcagcgcatcaagtcggcttaaagaaacaaattccttggcattgattcgctttctgcgtttcttgcttatattgacaatgccttcacagacctgatagcgatgaaattccaaccggcttttagtgcctttgatcaccacgccatcgccttcaagatacaaaactgggacctttttcttagtgcctgcggcatcatatcttgaatctgcttcttggcccgctttaatatttttcccggccatttttaccaaattgcccacctgcatatggctaatattaaagccagacaggcaattgactgctagagcagtattgcgataagtggcaacgctgcttacttctaagatgtttttgactgctaaaatactgtagcgcttgtatttgtcaaagcccattaattcatccaagggataccttgcttgtttgcctgggcagacatatcttcttctgacatacctaacttcgccaaaagccatattgattgagcgctcattcttcttatcaatctgatagccctgtgctttaaccttggtaatcatttcatcatcaactttagctaaagccaaggccatgatttccttaatcaggtttaagaagaaacagattatttttctttcacgcttaatataattatcttcagactttataatatttgcgatttcagttacaattgaattcataaaagaccagcttctaatgtgttttttgttcttaacatcagactactggtctttttgtttgagctcaagtccaaattcaaaggacttgggcttttttaattatttattcaacttaccgtaaaaaattatacacttagacttacagcaattaaatataagtccaatcctctatattgcttgaatcgatgccaggtttttgaccgtgaagattaaagtctaaatcaactgtcggttgaaacagtaaatgtactcattgaaagctcagtagccttggtatttttcgctgcttgaccccatgctctcaatactgcttcgggaattcctttagcattagtcaaatttacgttacttaatttattaccaacatggccgaaggaatcaccattatcaccaatattattaccaaagtttacattgcttaggtcaatattggataaattactatcgccatcgaacaaactagcaatcgatttagcattagataaattccaaccactaatatttacagattcaagacttttatcatgaccaaatgttgcataaatattagtaacacgacttgtatcccaaccacttaagttaatactttttacatttggaatactagaaaataaaagtttcagattagttacattggaattcaaagttgtagtagttaaatcaatggcagttgcatttggttctttattgcttgaacgtatccattaactatttctctagtaatgttgcgggcatttgttagatcaacatcagttaaggcattattatgtgcaaaaaagttccaagcgtttaccacatttttgtatacagtatcgcttagatcaactttcacaagcttttcagcgccactaaacatttgtgacacgtcactgaattgacccatattccagccagcgatgtttacattttcaagattcttgtcattttgaaacatagatctaattgcagtggcttcactaacatctaaatgacttagatcagcagactttaaagtgtcactgttcattaaggctgcggtcatgtcacccttagcataaactttgttcttatctccctcactgtcaatagtaatgttaactgcacctgcatctttgatagtttctaataagtctttagtgatatagactttatcatcagtagttattgttcctgcattgataaaatcttgggtattagggatgtaaatatttttattaccagtacccttatatttagttaaagtgtattgatgagaattttgatctaaacttccatcccaatctgcagtgttgtactgactattttgagtggtgttagcttgtgtcttactagttgaagctactgtagtagcttgcttattggtagaagtcgtactctcctgcttgttttcattagtagctatcttgttcttactttcaattgatgatccgacatttgagttatcatcgattgaattgttcttagtagttaaatcagtatttgaaagatcaactttgttagtcgattttgtcttcacaatactagtagtgtcttcagttttattggcaccatttgtatctacattattagaagttttagttgtggaagcaacttgctctgtagtagtttggtcctttataacactggtagtagcactatcagatgaatttgcatcaacactatcagcatgtactgtttgactagagtaactcataaaagtcaatccaattagtacagaaactgcaccgattgttattttacgaattgaaaaacgttgtttaatagaatcaatattattgtttctaaggaaatatcattaataaaaaatgaccgagaaattaatctcagtcatcttcttatcaataagggtatctcatttctactaccctactcgactagtaccattagcataattcaaagttacgccatcttgcacgttgaaaatgtaaatattgaaatgaactgcatttgagttaaccgactgcccttccatttcaactccgcgagccaatagttcattgccacgaaagaccggtgtcacacggtagcggacgtagttgcttcgactttcttttacataatcagcaacctgatcctcatagcgcaacatatcaggatcatttagctgccttgtacctgtcatcaaatttttaatgttgttgttctgtcctgttagctgataaccaatcaaatggcagcgattatagagccagccgccagcaactcgtttattatgccaaccagtaggatcaacatgtagtggttcgcgtctagcgcttggcatcagcgactgaataagcaatgcgtttgcggcagttacccgattcaaaccatcgaggttaccatattcttgccatgctccgcgattagtactcaagtcactcttagaaaaactaggatcgttgttatttactgtaatgatgtttttcccagaatagttaagacttgccagttttgcggcactaacagattcaatattgtgtttgccagtgtacttcttgagttctttgcgcagtttagcaatctttttgtctaggctaacaattttcttttcagtttgcttgttttcctgcgcaatttgcttggtctttttctcagcactgtggtcatatttgatgatagttttaaccttggcgatgacattttgacttagactaggattagtaatcgcaccatagccgccaaacaaaaacaacgtacttgaaacaagtgtaataattttcttcttattcatcacctttttgcctttctgtaaccagcattgattgcatcctgctcactattgaagtaaaccgcatttgcggaattcatatgatagcctgcttgtcctggtacgtgataaatcttagaattgacgttaccgacaattttgccagtttctgctgtatctaggtctccatgattgccgccaccattagaatgatgtgttgcagttgaacgactagattgagctgactcgttttgccgtgattgttttgctatttgagtagcttttttagcagctgcttttgcctgttctttttgctccttctcttgttcttcttttttatccttagcatctttaagttcggagcttagcttatcgtactcatccttcttcttcttttcttcggctaattcaaaagtctgctcttctaagacttcttcatcagtagtgcttttctcttgaaacttcttctggtgctcaatatatgctggttgagaatgtactaattcacgagtgatgtttagaccatatttatttaatagcagtttttcagtatcactaattttataaatacttcttcttggtgagattagtaaaccagctaattttaaatcactaagcgcccaagctactcgactaattgctactaaatcatgatatttagaaggatatcttaaattaacaagttcttcaggtaaattaatctctgtgacaacagcttatcaagctctctacctacccattcttctttagtactcgctacctctagcatgggacctaaaaatgcatcccaagttggcatcccattttcactatgttttaaagttttgtagtcaatcattttttatctttatcaacttaggcgtattactgtaatgtgttcgcccagaagcttttatattaagattgactggttgcatcaaatttacgctagtcaatattgcctctcctgactttaaactcgacaactgagctaatttgtctttatttaggaaattattgattgctttaatttcatattcaccagttaaccgatgcattaaaagtgttcctatctgatttaatactatagttggcacatctttggggctttgagtagttaaaaatagaaatattccattttttcttccttctcgtgctaacgtagccagaggagaaataaaatcatcttgagcatctttttctaaagcatatctgtgaacttcatcaacaaataataaagttggatgttttgtcatatcatgatttaataagaaattacttatatagtctacaattacttgtcctaatccaattgaaaatttggaatcatttaaacgtatatataatgatatgtcattaccttgaaattctaacatttctttattaaggtctttgagtatctttttacctttatctgtttctccaaaatccttatcttgagttttactatctacgtttaaaaataactcttttagattatacgtcttaatcaaatattttactttacgtattagccaagaattagctccatatgtaaaataatcaaactggtaggttccttgttttatacctttattccaactaagttttaaagaatctttctcaatttgtttatctaaattgtttatatcaaatgattcattaaaaactttatcagattcccactgaatctgaagatgcttgtactgttcttgatttgccccttcacagtcaagaatatcatttcttataaatctattctctgcctcggttaaatttaccttatttaaatgctttttatagtattgaacaaattttaatttttttattgcctctaaaagctcaatcacttgggaattatcatttggcctaaataaagaaatccattgttcatcagtcaaattagcagtattcaagaataaatttttccctattgtttttaaattaacctcattttttgaaaatgcatctttatattcaccagttggatctataatcaaaaattttccttttagcttttgatatttatctaaaatcgctaatgcactagttgatttaccagaattcgttgctcctacaatcataaaatggtgattaaataatccatcaacactaattttgaatggaatagctttcttttcatttaaattaaagcttgaaaattcaatttgattatcccttttattaatttctaatgaatttatatatttcttaatagcttcatcattacagatatatgccttatcaccaattcctactgttagatctccgggcaatacaaacgtatttttatcgtacattgccattagtttaatttcaatatttgggtaaataatatcatcattattttctattactgccttatgaatattatcagtattattaatcctagaacttattactttccctaagaaaattggagactgtaaaatagtttgtgtaaggatgaatgattccttaaatttatttctttaaacattagaaaaaggagttcctttctcgtatgattggtttgaacaaaaaacacatacagaaagaagaactccttcatgaatgattttaccaaagattttgctcaagctctattcaatccagacaaaataaatgatttattgcgcaaagagctacaacaggctgttaataacttgttagaagctgaattgactgcctttctgggctatgatccctatgccagaaatggctggaatactggcaactctagaaatggtgcttatttccgcaaagttgatacgcaatttggcccaattgaagtgcaagtgccccgggatcgcaacggtcaatttcatcagcacacgctgcctgactacaagcagcactcggatatcttggaaagcatgattatcaagctttactccaagggcgtgaccaccagggacatagccgatctaattgaaaagatgtatggcagccattacagtccagctcaggtatcaaatatttccaagcagatgattccaaaggttgaggcttaccacaaacgcaagctaagcgacaagtttttctgcgtctatttggatgcgacataccttcctttgcgccgagaaacatttgagcgtgaagcagtctatattgccattggcatcaagcctaatgggcacaaggaggtcattgactactgcattgcacctagcgagaacattgaagtctggacagatatgcttcaaaacatgaaatcccgaggcttaaagcaagttgagctttttctttctgatggtgttgttggcatgaaaacagccttggccaggacttatcctaaagctcattttcaacgctgtttggttcatgtcatgcgcaatatctgcgctaaagtacgcgtcgacgatcgtgaaaagatcatgaacgaattcaaacaggtgcatcaacagacaaacaaagaagaagccacagctgtcctgcatgacttctataccaaatggggcaaggtttacagccatgttatcagaagcttgaaagacatagaaccagatctgctggtcttttataactatcccaagcagatcagagcttcaatttattcgactaacatgattgaatcatttaacaatgtgatcaagcgcaaagctaagcctaaggcagagtttccaactgaacagtcgcttgatgcttttattggcattcaggcaatgagctacaatgaccgttatttcaatcgaattcataaaggctttggtcaggttcaggacaccttagaatcctactttgattaaataaataattaaaaaatcaatttacgagaaagaactatttacacaaaagatttgacagtttcgaaaattgtgccattactatcaatcaaaacatgataattaatagtattagggcgtaaaacatcactttgattgaagcgatacttcaataaactcatgttttctatttgaatattagcaaaaatagaagatacagtagatattttacctaaatagtattcacatttgtctacatgcaaatttttgtctgaactatcaaaaaagttatctatcaaactcatagttatcccacataataagataaatcataattataactacacattgttgctttaagaaaagcaatattatatcctcgatctctcaaatcatctaaatcactccagttgtcattaacatcttcttgttctgtttttttatcaaaattatgaatattataatcagtaatcaaacaatctaaacttgagttatgcttaattgcgtttataatcattctacttatgtgattatcaccaaaactaaaacccgaagtaactaataatgtattaggttggtgcaacttattttgaaatcgagacatgagatcaaaatagggttcctcatagctctgagcatatttattagaacttggaaaaatcatttttacatgattactgttatctctaatcgtactttttacctcttccacagtcgatttagtaactttattttctttttcaatccaattaatagacccatgaattttaagaagatctataacatgctttttatagataacttgtttagtattaatattgttaacttctttactcaaaacccactcatacatatcatcattgaattctttattatttccaaattcaaatccatcaaatattgtgaagttatctttttccagagatttttcaattgctaaatcataatttgtagtcgcaaccatcaatttactgctatccgaatgaattaaattaagcaactttaaaatcactttatcatgcttaaatggcattttagatgtactatcgaaattataatcaactgaatcaagtattgatagtaaaataaatctttttaatttttttgcttgtgataaacttggatttctgacttttttaccagacatctctgcgtcttgaatatataaatttaaatttgaaatatattcttctaatggaaaagaaaaccatgtactttcatcatcaaaattaactttttcaaatttttcttgttgatctttaggtaaaaagatcttagcatccttttcatctaaatattcttctaaattatttgttccataaagctgattgaaaatattccatgaaatatcttgcatagtctttccataatttgaattaatatttccattctcattagttacaactgaagctccggcaccaactaatagcacaacattactataatctttacttataaaacgcaaaacagcccttttgagaaacttatgaagttgcttttctaaaaacacaaaatcatgatcattatcatcatctggatttattttatctctataaaatttacttagtgctttctttttatcttgtttattatatttatcaggtaacgataactctatatctatttctttatctctgtacaactgcatacttaatctcctcgtattatataaattcatctcttaaaagttaattctaatatataaacaaattgtcaattttatcaacaattctattctgctccgctaatggtggaagaggtaatttcaaattaattaatttactcaaatatattcctttttgggttgtccctttcgcattagcaaaaatttgagttttaaacattgctgaaattaaaacataataaagaaacttacttaaaatattactactaataaccgcaacacttctttgagctgtaaaaagtttatcagtatcaacaactgcagcattacctaacgagcctacaatagtgagtaatacatctccctttcggatgtttgttcttttatcctcttttaaaaattgatcttcagaaacaaatctatttgataaagaaaaatctatttttccttttttaatgtttattgcagagataacttgttttccttcatgtgaattcggtgggggattatgcgtaccatcagtaatcctttttgcaatattccccaatctaacccattcccaactatcaggaatatcaaacggcttttcctcatcagtgatcggaggcaacggcttgctcttcttgatctccttttccttgatcatcttccgcttctcagccttaatcttctctagcaaaacactagctggttcatcatggggatcttgctcgactaattttccacgcattgccaaatccagcaccttcgacttcagcaaagtctgaagttttgcgtattgttgagtagaagattcgactttgcgaagcaaagcgaatagctgcgctattttagcagcgattcgactttgctcttcaagtggtggaagtggaacaagagtttctttcaacttttttgaattaattgttggtacagcagatccttttacaaagtcttttatgtccaagcttaaaaacagatagaatatgaacttgtgatttaagtcattgtatggtattaatcccccagtattaagatcaaccaatgaatcttgagacaaaattcttttttttgcggttaatatagctccaccgtttttaggaaaaataattgtatttttaggcattacttgtcggctatatttttctccaacccaatttttcacgttttccatatataagttattattattcatatctttaaccttaaagtatggataaatattatcactacttatgtcttctttcttgggagtttttccattttttagtaaacctacatcccccaatctaacccattcccaactatcaggaatatcaaaaggcttctcatcatcagtaatcggagcaagcggcttacttttcttaattttcttttccttaatcaactgctctttttcagctttaatcttctcaagcaatacactagctggttcatcattaggatcttgtggcaccagctttccgtgcatggccaaatccaagattttttctcttaaagcctgtgcatcaaaatctaaagtattagtcttcatcgtcaattccttctaacgccttattaagttccgcaattgcatccctaattgccttagacttgtcattcatctcatctaagatttctttcaacgaacggttatcgtgctcttcttcatcattcatccaagaaatatcaaggctagtattaggacgcttcaaaatttcatcaatcgtaaacttgcgccatctaccgttagaattcttctctttatcccaagtttcttttctctttgagcgatcgtcaacgcagaatagtttttcaaattccgcaaaatccttgtcacttaatggattacgcttaccaaatgaccgcatctgatgacgcatatcataaatccaagtttccttggtattatccttgtcactttcaccgcgagtaaagaataatacattggtctgcacaccttgagcgtagaaaatcccagtaggcaatctcaagatagtgtgcaagttgcacttgttgagcaagtcttttctaattgcttcgccaacaccatcggcaaacaatacattatctggcacaactacggctgctctagctttaccattgtgtttaagtgaattgtagataatctgcaggaagttcaattgtttattactagtcttataagttaggtcgtcacgacttacactgtcgtcactacccttcttggtaccaaatggcggattagttaaaactacatcaaaatctttcatccatttaccatttgaagataatgaatcccctagttccaatcgtccatccatgccatgaagatactcattcatcatggctaaacggtgcgtggtttcaactaattccataccagaaaaagcttcttttacttgaaattcttctttatctgcggacaaggttgaataatcatctgtttgatcttttaaatatctgtcagctgctaccataaagccaaaagtaccagcagcagggtcattacagcgatctccaattttaggctgagtcattctaaccatcatgttaatcaacacacgtggggtaaaatactgacctgctccagatttgacttcgctggcgtttttctccattagaccttcatacaaatcaccaaggccttcgtcacgagctgaccaccaatcaagtgcgtcaatatcttttattattttttccaggtcagcaggtttgtgaattgaagtagaagcatcagcgtaaattgaattgattcttggactattaaccacttcaggattacctaaatcaagtaataattggcgataaaagttacttaactctagtccttcctttgaaacaagattatcccattgatatttttgggggatatcatcctgttcaccttgttccttactcatttttaagaataagatataagttaattcagtaatgtaatcttggtaactgacaccatcatcacgcaaaatattacattcattccataacttttgaacgatttcttgattgttcacttaattttgctcctttaaaaattgtctcttttgaagatttccggtagatatatttgaatattagtaaatggatcatcattaatccagtcactctttttccgatacaacttattggcgtgatctactgcatcttgcactttatcaaaaatatattctcgataactattacctttaaagcgactataatcttgattaaaataggcagatctagacagtttctgtactagctcttttctagtataagaacgagtgacactttcaaaatgcattaaaatccaaatttcaaagtctattgaagaaaacataatagtaatatcattttttcgagcaagtttagcgcatttccttaattcatctttagaatgctcatctctatcgaaaacaacataagttttatctaaatgattatatttgccaaacttaactgctttttctactagacttttaccagacaaatctgcagcaactattttaactttaatatttgctaaacgatatttctgcttaagcatagtaaaatattgtttttcagattcaccttcacacagaattccaataattggattagacttagtcttatttcttattcttcccatgctcatccccatatttttcatgaatcatttgcaatacatctagcaaaccatctacatctattacaggaactgcaccgaatcggccttgtaagtatctcttagcaaacgaaatatcatgtcgacctttattacgtgcatcttcaaagtcaaagattgatttcaaatcactaattccgtgaaaatccttgtctaataaataaatttgatcaattcttaaatcgctgtctaatagctgaatatcatgagtagtgataataaactgattcaaattttctgttgaattaaaaatacgaactaaagcagctgcaagttcaacatgcagtgaatcatcaaattcatcgattacaatcgtcttctcgttaccattcatttgagcaagcatcattgctaatactatataaaataaacgacgtgtaccaacagactcttgtgttaatggaagttccccagaattaataacttcattttgatgataaatcttgtgaaccgtatatagttctttagttgttttaggataatcaatatttaaattctctacaatcttttgtaattgtggattcaacggattagtaggtacttctctaattctaatatcagagatattaaaatccgcaaaacttaagaatgagatcatttcttttttgaggtattcatcttccatcaaatttaaaagttcgtcaggaatatttactggatagccgctgccaataaaaatcagatcattaacaaaccacttatagatagcaatacaatctgcatcattttcagattgtgctaaatataggaataaagaattatctctaagcttaggaatgctgtcttccaaaagcttgttagagacttgaatgtcatttccatttcgagaaaaaatttctttttccttgttaccactaattaaggttaatgcttcactggtaatgctctctcgattgtaactaaatgaatagtcataaattttgttttttaactcaagcttcacttcaaagtaagtatcttcaatcttggacttttcatcaaacaaaaaaggataataatttaacttatcagttacggcttgagttggacgtgttactattccttccattgtttgtaaagcttgaatcaattgagacttacctgaaccgtttggaccaaataacagtaagctttttaataatgatggatttttacttgagaaagtattagtttctttcaatttacgtagtctattgcctgtctctgcagacaaggtagtgcgctctctaaaagaagcataatttttaacagtgaactcgattaacatattgtattcctccgtgttaatttaagtttagcacacgcctttttttatcacaacttttcgtgattaaaagcaaaaaataccagtaatggcatttttaaacatataaattctcattcaacacgtaaataatctgatcagcattttctggaaagatcttcttaatttgcttataacccccgtgacgtttaaagaaatagttatcatcaaaggctttctcagcatttggccccaatacagtagatgaaattaattggttctcaattctcttcaaccatttcttttgaggaatagtccaatcagctaaaccataaactttttgcatggcattatgaattctaacatcatgatccaccaactcagatccagccgcagcttgtctaatgaagctaataatatcggcagtggtctgaacatggttaacgtttttccatgcactttgcaaatcattttctttaaagccattttgctctagcttaagtttaatatttttgagttcatcaaaagttaaatccttcggtctagtagctacaacttgtaaggctggaatagtattgacgttttcattaacgaatttattgaagttttcaatataatccgctggtttttgattgccatgcccataacctcgacttacattaattactttgtctactgcgtctgatattatttgcttgggtttgacaggtttgatgtgatctaactgctcaaacttaggccattgctttaaaaattgggacttatctaacttacttaattcacgggcccattgatcaaccgaattaatctcagctagatgttggaactcatcacgtttagtatcatccaaacgtttaatttttctctcaacggcaccagccatatctacttgatactgagcggaatcctcatttgtctcaaagaaatcatccttgtgatttaagaagtagtgaacattatgtcctggatttttaacaacaggcttcatgtttgtcactttattcattgcttcatagattccgacggcatcataaatcgtaaatttggatttattaatttcgggacaaagtctggttgcccgtcccaacatttgctcatagaggattcttgactgaactcttcttaagaagacaatactagtaatttgcggtacatcaattcccgtagttagtaaatctacagttactgcaatattggggttggtttcattcttaaagtttttaatttcttgattaggatgccgaattgaaccagtaattttttcgatagcatcgtcatctacaggattactcacttttttgaatgcttttttcaataagtcaacaaccatatcagcgtgttcatcagttgccgcaaagattaaagttttacctaaatttggatcatttggatcaagatatctttgagctaattcatcacaaactacttcattaaagctacgtgtgataactctcttattaaagtcttttacatcaaaattcatattatcaggtaatttttctttattgatagttttttcatcctgatcaaaaagactaacttcggcaccctttttaaaatgaatcccttcttgagacaattgagtttgaataattactggtgcatcatgatccactaaccagccatcgaggacagcttgttggtagctatacgaatacaccggtttgccaaaaatatcaatcgtttgtaaagctggcgtagcagtcattccaatagcagtcgcatcaaaataatcaactacacgtctatattgactaacataatcttcttgactatagaattgatattctttatcgctgagctctttatcttctgcataaccacggtgggcttcatcaacaataatgaaatcatattgaccaacggatggcttatcatcactgtcttcactgaaaaataggcgtttgatcatcccctgaaccgttgcaatttgaatttttgttgatatttcaggtgccttatcactcaattcctttaatccataaatggaagaaattgacatcgtacctattttattatctttaattgcattggcagtctgctttcccaatgaattacggtcaactaggtaaagaatacgtctagctctcttatgcttaagtagtctgtacatcaaagcaattgccgttctagttttaccagtacctgttgccatggcaagcagaatacgcttttttccatctttgatggcattttccatcgcttgaattgcagcaatttgatattcacgatgtgcaaaatcaggaaaatcttgatcatctaccaagtcttgatttgcttcttctttatttttagcagaaagcttcaacgataaatcttctggcttatgaaattcctctagagcatatgcgctttctttatgattacgtgcatcccagaaccaaataccagatttttcctgatattgtttaagatatggacgaccatttgcagtatagatgaatggaactttgtaatcacccatttcatttgaaactagacgataatctgatctaaacggtacctctttagaatattccttaggctgtgccatttgccctacaatatcttggtcccactttttggcctcaacaattccgtagaactccaaacctttgaataatgcataatctgctcgctgaccattaggtagaacccattcagcaattgccatattgtgacctttttgcggttcagttttctgcgtccaattgttcaatttttgtgaatctacttcccagcccgcatctcgcaattgttgatcaattaactgacgtgtttctgcttcagttaactcatgttttttagcaaattgaacgttaatctggcgtctgcgttcacgctcttcaggagaaattatgacttcctgcaccctattttgttgtaattgctttatcttttcttcgagagctttgattttatcttcttgagttttaattaaagctttttgatcttgtggctcaacataatctgcaactttatccagagaataaacttctaaaaaccatttccataccaaataagcactctgatcaatttcaagcgcaatctttttggtagcaataaaatgatcgtcatgcgttgccttgttccgtcttaacctgatcaaattaagagcattcaaaacagtaggtggatattcattcttagaatatgccattttttcaattcgttgtttttggtttaattcccaatcacctaaatcatccaaatgcatgatttctttagttaattgctcaccgaaagtaccaaaaactgtcaaactacttctaggatcagagtaaattaagctttcagcgctggaagccaattttgcgtattcttgataatctttttgtgaagtttcaaagttagacattgtttttcctctaatattaaagtaaatatagttttattctacctcgaagccccatttaataacaagtagtgtaggtacaaaaaaagaagcaccaacacagtgcttcttttaacataaactaaataatcaatcgaaccctacttcgccaaaacatattcaaatcccaacatattggtatagcgattactacctatcttaatgtaatcatagcctttgatcctcttggtgccataagtttggacataattctttgtcctggtattctttgacttgatttcggcaacttttttaccctgggcatttaccacaggtgttacagtttgcacagtgtagtaatgtttgaccacttttagcttagatgcttcgaaattaccatacttaacatatttatttacatcaattttgacatttttttgccctttaatagtcataattgcttgaattttgtaaggggtccccttcttcagtaactttttcgtctttatacctttagcagtataaacgtatgcattactttgcaatttctttttcttgccaacagtaatgccatcagtgattaatgggctaatatcgactttgcgctttctaatggtatctgaagaatagccaaaccaaaatggactcttcttggtaacatcccatactggacgagttgttggatattgccaattacgtttgctgttataaagttgaacgtcaagctcacctgtaacttgaggctggtaatagttgtagatcaggttcatcactttttgaacctcataagtagttaactgatcagttcgtctaacgagcaactttttaccatcaagtgctttagtcgtattagttaaaaacttgtcagcttgactaaccgcaacttcactggcatttgtctcaccaacaacagttttagcattttgcaaataagtcaagaactgtatctttttatcatagtcagctaatttatagcgatcagtcttttgaaccttttctgcagtggcaattgcagtagacaatgatgacttattagttgccaccttgctttgtgattctgcttcaccggctgtgttgattggcgtaagttttactccctcaacctttttgacattactagccaagatatagccttcattatctaacttattagttttagcattagcttcacctgttgtatggtagaaaagttcagctttcttttcacttggtacccaaagatagagtgcttcattaattttgtggttgctatacattgcagtttcttcaaccgtattggtatagaactgtttagatagctcttgacttgtcttttcaccgtcaacattgtacaaaagaatctttttatccaagacaactttggtagaatcggccaattcaagatctgaatgattctctaaagcttgtggcaaattcagatcatcttctgatacccaataattagtgcccttgatccggtagtatgaatagtgatcatgatcaaagtcggtcaattgttgtgggaattgcccagcataatcgactgtgatcttttgtcccttctttaattcaatattattaggatctgtaccccaacctgttgaattaacatatcttgtgatggttgaagtgttcttattaacggtcacagtaattggggcttgagtgattagacgatagccatcaacgtaaccgatatttgcgaccttgatgtaacgaccagagcctaaatagtagtaatctttgcccttaatcttagtgtaagggatgcgatacttatttttggtagcttcataatagtattttgctttgccactagtgattttccgtttgccaacgtacttgactacgctaccttttttaacaaagccaacttttttgccagacttattgtaaatattggcattaaaaattgccgttaaataagcagggccagatattggcgttacataatctgaagaaatataaacattcttgcgtaaaggatagtataactcaccagcactgtagtcgcctggatcaaccgtcttaaaaaatggttttccataatatttaatcgtgctacctttcttaggtgcagaaatatgatccaaataattgcccgagctattgtacaacataatatgtgaatcaatgacttttaaggagccagttgcattgcttttagtagctgcggcaactgatgtttgaacgtttgaagttagtggtgctgcggcaattggagacacagccaataacgcagtagaaattaagataagttttttattgattttcataatgaaccttcgatctaataaatgcaattaagatttgatcagttagtactcatatcatcattatagcagttatagttatttattccttgatattgagcctatcaagaaagagatcgaaacccagtgtctcaatctctttcgattttattttgttttcttcttacgagtccataatccacttaaactcaagccagacagtaataaccctaaccatgaaagatcactatcttgcctacaggttgctggtaaaacagacttagaggatgatctcggtgtaatttgttctactgtatcgtttttcataatagaagtttccgtttgagcagctgtagttttaacagagtttaatcctactggtgatgcttcactatgcagaccaactcgatgagtggtaggctttctttttttatctttggcatgacgctcaagctctgtggcctttgctagtgccggtaagaatacttcttcatcagttgaagtctcctgacctttttgttcacttggatcatcagaactactaattgaagattcagaagattggttagtttcatcagatgctacttaatcctaaaacagagaagccaattattgcggacacaacacccactgataattttctgaccgaataatgattttgagtttcaattgattttaagtttttcttttgataatttcttctttctagcatatctatattataatttattttgacaatttaacactatattttatatacgcgatcactttcaaataaaataaatttagagactgtaaaatagtttgtgtaaggatgaatgattccttaaatttatttctttaaacattagaaaaaggagttcctttctcgtatgattggtttgaacaaaaaaacacatacagaaagaagaactccttcatgaatgattttaccaaagattttgctcaagctctattcaatccagacaaaataaatgatttattgcgcaaagagctacaacaggctgttaataaattgctagaagctgaattgactgcctttctgggctatgatccctatgccagaaatggctggaatactggcaactctagaaatggtgcttatttccgcaaagttgatacgcaatttggcccaattgaagtgcaagtgcctcgggatcgcaacggtcagtttcatcagcacacgctgcctggctacaagcagcactcggatatcttggaaagcatgattatcaagctttactccaagggcgtgaccaccagggaaatagccgatctaattgaaaagatgtatggcagccattacagtccagctcaggtatcaaatatttccaagcagatgattccaaaggttgaggcttaccacaaacgcaagctaagcgacaagtttttctgcgtctatttggatgcgacataccttcctttgcgccgagaaacatttgagcgtgaagcagtctatattgccattggcattaaacctaatggacataaggaagtcattgactactgcattgctcctagtgagaacattgaagtctggacagagatgcttcaaaacatgaagtccagaggcttgaagcaagttgaactctttctttctgatggtgttgttggcatgaaaacagccttggccaggacttatcctaaagctcattttcaacgctgtttggttcatgtcatgcgcaatatctgcgctaaagtacgcgtcgacgatcgtgaaaagatcatgaacgaattcaaacaggtgcatcaacagacaaacaaagaagaagccacagctgtcctgcatgacttctataccaaatggggcaaggtttacagccatgttatcagaagcttgaaagacatagaaccagatctgctggtcttttataactatcccaagcagatcagagcttcaatttattcgactaacatgattgaatcatttaacaatgtgatcaagcgcaaagctaagcctaaggcagagtttccaactgaacagtcgcttgatgcttttattggcattcaggcaatgagctacaatgaccgttatttcaatcgaattcataaaggctttggtcaggttcaggacaccttagaatcctactttgattaaataaataattaaaaaatcaatttacgagaaagaactatttacacaaaagatttgacagtttcaatactatttttcatgccttcttttcttatcgaaatacttgattataagagcaatatagcttttatcaatcgaattataaaataacagttatttaagtataaaaaataaaaaaagcagatcacccagactaaggtaatctgcttccgttttacagcaactaatctcactaccacttaagcttcagtttatggctactttgctctacctgtaaaaatgaatcaacgtagcgcttaaaaccaggtaaatattttgcaatcaaatgatattctcgtgaattaacaatttctttcttttgggctgcagaataattactttcacctacaaaaaagttccaattcaattgatctacaaattttatgaccacgttagcatcatttttatctggtaaagcttgcgcaatctgatttagttgcttttcatccaaactaaaaaacaaatgcttcaaatattgcgaaaaatctgttggcactttttgcttttcttctgcagttaaccacgattccattttgaaggaatgcacctgatattgcatccccgcttcgtctaaatatagctgaccatattcctgcttagtcatacaaaaacaagctcctgctacctccgcaattggtcgattagcaaacggaccaataatattctgtgcgtgcatatggccagaaaagactgcttttacattatatttttgtaataaaccttgcagtgcaagtgcattatcaagaatatatccctgatagattactttattatggcgatacagattatgatgcataaagaatagcacttgttgctgcttttgctgcgcatcaattaattctttttcaatccagttcatttgagattctgaaattcgaccgttagtaatcggatgagtttgtgattcctgcttgccataaatatttgagtcagccaatattagtcgatactgcttattcagattaacgctataagccagtgaatcagaatcttcatgtaaagcataatgataagaatcagcaaagatctctttccaaatagctgggctaatttgcagggtgtaatcttcatgatcacctttaaacttgcgagcccagccgtcaaaaatatcatgatttcctggtaaaactaagaatgcaattttatttttagttaatggcttaaaaatattagctaaacgttctcctgatattttagcgccattaaaggttacatcaccagtaattatcactgcagtgggcttctcttggattactttacgtacaaacgcggtcaaagcaatttcctgataatctaagtctttacctgcactagtgttgcgcatatgctgaaaagcaagaccatcatcatgtaaactatctgcaattagatgtgtatctgataataaccaaagaattggcttctttttactagtaatcacaatttacctttttcaaaaatctattttcactttaactactcatcattataccaacaaaaaaggcatccctgctagggatgcctcattgcgataaaatattgaattaagcgtcgatttcttcgatcttaatgttaactacgaatgcttcaggagtatcagtgcctgaaacgatcttcttagcgtaatcgtcgccttcatgaatttcagcatgtcctaaaacacgaaatgccttatgagtaggaacatcagcgacaacaatagctgctactgaaccattcttcaagttttcataagcagttgacttagtcttttcaagatattgaatagttgaagcatcaattgccttaagtgaagccttaggaccaacttgtggcacaccgttagcattcacagttgccatgtatggtaagtgtgagttaaaaaattcaatttgttcatcagtaagcttagtagtatctaattttttcataaaattcgacctttcttttcttaacttcattattaattataagctatttgctagaaaatagctattattttgccttagcttaattgattcttacatttatcatacacaagatattgtatttaataaaatgtgttttttaattaaatttctcttgctactaatatttttattaagtaaatagtcgttgatatatcaatgcttataaatgctggcaaaaagtcaaggattgaattttctttttttagccaatagtatattatcttgcattagttaataagtgatacaagatattgtgcttattaaaataaaaatatattttaaatttcatttttattaatgttatttttagtgaggagaattcgatgacaaagaaaggcttaacaaaatatttatcaattggtgcagtaactactgcagcattatttttagcagcttgttcaaatcaaaagagcactacatctgctaaaaatagtaagacagaaattactatgtggcacgcaatgaatggtgcacaacaaaaaactttgaaacaattgactaataaatttgaaaaagaaaatcctaacatcaaagttaagctagaaaatcaaggtaattaccctcagttacaagggaaaattacttctactcaacaaaatcctaataacttaccaacaatgactcaagcttatcctggttggctttatcaagctgcgcaaaataagatgttggtcaatttgactccatacattaataattcaacttatggttggggctcagtagccaaatctaatattcgtcctgaattaatgaagggtgcgcaaattaatggcgttcaatatggtattcccttcaacaaatctattgaagaacaagaccttacttaagaaatatggtttaaaggtacctaaaacaatggcagaacttaagtctgtttctaaagcaatttatgaaaagtccaaccataaaattgttggtgctggttttgataacttagccaactactatgttctaggtctcaagaatgaaggacaaacttttggtcgttcaatcaagttagattcggctgcctctaagaaagttattaacttctacgcagatggcgtacgcaatggctactttagaactgctggtagtgaacgttacctctccggtccttttgctaatgaaaaagtcgcaatgtacatcggtacttcagctggtgaaagctacactaagatgggtgtaggcaacaagtttacgtacggcgttgctcctcgtcccggtgaatacactatttctcaagggactgatctttatgtctttaaccatgcttcaaaagcacaaaaaaatgctgccatgaaatatatgaagtttttgactagcaaatctagccaattaacttgggctaatgagactggctatattcctgttaacgataatgtcttaaatagtaaggaatacttagacagcaagatgaaattgcaaagtgtcttaaaggattcaatgaagcatctctacagtgttcctgtagctaagaattctgactctgcttataatggtatgaatcaaattatggaaaatattttaattgctgcaaataagcatcaaaatgttaatgctcaaattaaggctggtcaacaaaaattagatagcgcttggcgtcaataatgatattaaaaaagcatccccttctctattttgattagggatgcttttttgcatttgcaagagttgaatttaatttaagcactcacatagagtgcgacgtgcaaagcacctacttttgactggggtaaatatttggcttcatcaactattatactatgtcaaaaatatataaagaagagttaacacataaaatacaaaacaaaatcagtgcgaaactccctcatttttatgttcacatagggttcgcactgatttttttcttaactcaaatctttcttagtaactgccaaatgtgccttatcattgataaagacccagattggcaaatctattcctgttgaatcagtcaaattatttacaatttcgctgataaaaagctggaccattttcttaggcggttcagtaaagtctcttctttgcggcgtgtaccataaacctgtgattggctttttagtttgtcgatcgaaaatacaattcagggtttcatcatattgatcaaatgaggccttgtagactatatgtaatggatgatgtgccaagttctcgactaactgataacgcatatcgtccgcaattcttcctttactaatcatcattaaactggtaactggaccagtttctttttcaaatttttgcaacttgccttgtttgagtagcttcttttcaactgaaataaaactatcagaatcaactaacatcgtttttccttctctctactatctattataagcaagctgtcaattactttacataattttgcttattatgcaaaaaaaagccatgacctgaaaatcatgacttctcgcgaattcctcgtccgtaaatcgaaatcttcacgaacatttttaccttaacacaattaattatactagtctaattaattttaattactaaagcttcatatggcttcaatgagatattctctcctagtttgccatcttgtgcagaataattgctcaatacgagttgataattcttattttgatattgttcaggcaatggtactacatgatcagtaccattgaaattagtgaaaactaatatttttttagcttcatccttcaaaaaacgttcataggcaaaaatttgtggatcatcttttaaaaacattctaatatggccatcagaaatcagttgttcgtgcttacgcaacttgatcaatttttgatagtaagcaaaaatttcaccctcgtgtaattctttttcaacattaattctatcttgatctgttggtaaaagccatggctttgattcactaaagccagcaaatttactatcatcccagtgcatcggcacacgagagttatctcgtgctttagtttttactattgcaaatgcttcatcatcgcttattcccttttgtttcaatgccgcaaaagcatttttagcttcaacatctacataatcatgaattgaagaataatgtggatccatcattcctatttcttcgcccatataaatgtaaggagttccgcgcatacaatgtgtcacagtagcaagcatttcggcagatttctctcgatatttaccagtatcaccaaaacggttaagggcccacggctggtcatgattgttccagaacaaagcattccacccgccaccttgatccattttttcttgccattcagtaaataagtgctttaatttcatgaaatcaaacggctctttagaccacttttcaccatttttataatcgacttttaaatgatggaaagtaaagaccatggacaattcatgctcactcggcttagagtactcaatcgaattagcaatagtagttgaagacatttcacccaccgtaattgagtcaggatcttgaccaaaagtagagcgattcatttctttcaaatattgatgcactactgctgtatcagtataaagactcttttcctgacttggatcaccagttgaatcaactaacttttcatccttaccggtcacgttaattacgtcaaaacggaaaccatgtactccctttgaacgccagaagttaattactttgaacaattcttgacgaacttctgggttatgccaatcgagatctgcttgagttggatcatataaatgtaggtaataataatccgtatcaccaaattttgcccaagctggtccaccaaacttactttgccaattattaggcaaggagccgtcaggcttagcttttcttaagtaaaagaatttgcggtacttttcgtctcctgccaaagcttttttaaaccatatattttcggttgaacaatggtttagcaccatatccaacatgacgccaacgcctatttcttttagctttttagttaattcctcaaagtcagacattgtgccaaagcgaggatcaattcggtaataatccgcaatgtcataaccgccatcattctgaggggatacaaaaaagggattaaaccagatcatatcaacgttaagcttcttgatgtaatcgattttagcgatgatccctggaatatcacctactccatcgccattagaatcataaaaagatttgggataaatttggtaaattacttttttgcctaaatctgtcatttttatctcctataacttaattttctgtctacgagcaaagtcaataaatttaaactttttaggattatgaaaggataaagttaactgaaacagcgttgtatctgctaaaaaattatgactagctactagtactgcttccttactatccaattgcaatttctcttgtaaatcagcatcgatttcttctaccgtaattgccttagttgcataggatatatctagccctaatttattttctaaataattgtagattgatttttctgcttcttctgatggaagctcagtaattggtggattaaataagaaatcacagtccagcacttctggttcatcgttaatcattcttaaacgttcaacatagatccctgcatgcttcttttgttcagggaagaatttcttgaaaattgccggcaaatcatcaaccatttcatcattaagtagcttagtttttgcattcattcctaatgatttatttaattccgcaaagctagaaattcctgaaataggaaacgaaaacttttccaaattaaggacaatcgaacctttgcccttgattttttggattaatcctaacgaggtcaattgctgcaaagctttacggactgtttcgcgtgacgcgccataaagctctgtcaattgattttcactaggcaagcgctcgccttccttaaattgttgatgtttaatcttagaagctaagtcttgagcgatcagttcagattttgctttagtcatcttgaccttgtcctttcttaaaatcatgttcattatatttttgatgtacgtacatgtcaatagatatatctaaaaactatattgcaggcatgtaatcattttcataaaaatctattgacaacttgtacgtacaggaatattataataaatgaattttgtgaaaacgcttttataggaaagggagaataacacttatgaataaaaacgaaattgcattacttgctcctgctaatggtcaagtaattgcactaagtaaaacaagtgatcctatctttagcaaaggaactatgggtgatggttttggtttaacaccaactgataatacagttcttgcaccagttagcggcactatctcaatgattgctgaaacaaagcatgcgatcggaattactactaaagatggtctagaagtattggtccacatgggagttgatacggttggacttaaaggtgaaccgtttgatgtagtaattaaaaatggtcaggaagttaaagctggtgaccaaattgccacgatgaatatagagatgattaaagcaaaagatcttgatactacgattatgactttaatcaccaattcatctatgaaacttgatggcttagatgtaactgaaggtaaagcagaagctggcgatacagttgctcgagcttatttaaaggagtcaaaagaagatagttcagacaagaaactttcgtatgatgaattagctactttcattattaagaatgttggtggtaaagataatataaataacctgattcactgtatcacacgtttgcgcttttatttgaaagatgagtctaaagccaatgatgatattttaaaaaatcaacgtggcatacttgacgttatgcatgctggtggtcaatatcaagtcgtaatcggtaatgaggttaccaatgtttacgatgcagttatgaaacaattgcctggtcttagtgacaatccttcacctcaaactaataatcaggatgatggtaaaaatcctgtttctagagcctttagtaatctaattggttttattaccggctcaatgagtcctgtaatcggtgttattgcagcatcgggtatcatcaaaggcttacttgcactactcacccttccacaacttggtgctttacttagcgtcaagagtccggtctatgtcacagttagtgctatggccgactctgctttcttctttctaccagttctagtaggatttgcagcagctaagcggttaggatccgatccaatgattgctgcagtaattggcggtttcttagtttatccacaaatgattacttggggcaagagtatgacgacaatgtttagtcttggatcttggaacttccaattcttaaactattcctactctatctttccaatgattttagctgcttggctagctaaagaatgtgaacagtggttaaagaaagttttgcctagttacttgcaaatgatctttaccccattaattactatccttgtagtttcaactatcacattagttattaccggtccaatcattcaaggagccgcaaatggtatcgcagtctttattaactggctagtatctgcatctggctgggttggcggcttaataatcggtgccttttatcagttattggttatttttggtcttcactggggcgttgtgccactagttgctcaacaaattgcctcaactggtcaaagctcattaaacgcaattatctgcgcaacaatggtttcccaaggtgcagctgttcttgcagtcgcaatcaaatcaaagaaagcagatatgaaagagctaggaattgcagcagctatttcagccttctgcggtgttactgaacccgctatttatgggattaacttaagatataagaaggtctttgcttcaggttgtattggctcagccttcggtggcctagttactggtttaatgcatggtactatgtatggctttaccggtggtctaattggcttctcaagctttttcaacccggcccatcctactccactaaatagtttctatactttcctaattgccagtgctgtttcaattatagtttcatttattgcagtttgggtatggggatataatgacaacatgactatgggtaaaaaagtagccaagaagcaacgcccaggttcagctaaataaaaatttagagcaaaataaaacgatgaatcacccacaaaggtaaattcatcgttttttgtcttatttaagcagcatcagcaatccgttgtgcctcaattaattcagcttttctgatatcacgaggcaagaactgacgaatatcttcttcattatagcccacctgcatccgatggtcgtctgcaataataggtctctttaataatcctggattctgagtaattaaagcaaccattttagacaatgacaagtcttcattcaacttattctttaattgtttgaaagactgtgaacgagtagataaaatatcctcagttccattttcagttaaagacaacagatgaaggacatcttctttagataattccttaaagacgttcttttccttgaaagaaagatgatatttgttaagccatgctctcgccttacgtgaagatgcactacttgttgacatataaagagtaatcatacaatacgcctctttctaaaaaactcgttaacttctcgtacattagttctattgtataacttactttttgatagtgcaagctatttttacaaaaaaattgttgaaaatagtatacttaccttactgaaagaaggaatttgatgaattttaaaacaccaattgccgaacaaatgaggccgcaaacactggcggatatggtaggccaaagtgagttgctgggaccaggaaaggctttaagaaatattatcaagcagcatgttaatatttctttacttctctgggggcctcctggtaccggaaagacaagcttagctcaaattattgctaaagagaatgattatccctttgcttcctttaatgcttcaattgataataaagcacagttgaacaacattattaatgcttataagtatcagactctcgttcttttaattgatgaaatccaccgtatgaccaaaaatctacaagattttttattaccttatttagaaaatggtcacgttctacttgttggctctaccactgaaaatccaattatgtcgattgtgccagctgtgcggtcacgttgtcaaatctttgagttcaatcctctaacagaagacgatattgcagctgttttgaacaaggcatgtactaaggtccttaaattagtagatcaccaagttgaaaaaaattcgttaaatttgatagcagccgcagctgatggcgacctacgaattgctttaaacattttagagactgttcatgcacttaatcctaaaaagatcaccttagcaaatgttaaatcgtttactaagcagcaattctttagctatgataagaaagccactaaacattacgattatttagctgcatattctgactctatggctggctctgacacagatgctgcactttattatcttgctattttgctaaaaaatggagatttagcttcggttgtacggcgtctgcgtgagattccatatacttatattggcttagctaatccgcaacaagtaactcaaattgttactgcagctaatcaagctgaaaagataggaatgcctaaagctaaatatccactaatgtttgcaacaatgttaatgtgtatttcgccaaaatcaggagcatttgaggaaatttgggaaagacttgatcaagatagtgatcatcccaatcggtatcccatgcctaatagtttgcgtgactttcattataaacacgctaaagaaatcacgggagctggcctagctgagtcaccttttcaagctccgcatcaaatcgccaagcaaaattatatgcccaagggactcaaaggcaaacaatattattttccaaaagacaatcaaaatgaacgcagattatatgagcaatacctaaaattacatcgttatatttacggcgaagattatcaaaaataaaggacagcaatgcaattgagcatccctgtcctttttggttagattataaatgaagaaaattggtttattaattgcttctacgagagaagattctcgtccagccacctatatggtagttctatttaagttatttgttaaatgctaatcgaaaaaactttacgtactttttacgtattttattaccaataataacaaaaaagcagcggcgcaaatacagcgtcactgcaatatgtagcaagattatcaatgaagaaaatggtatttatcacttctaaggaggaaggatatttcatctagccacttatatcctaatgctacagtattaatttgttaaataaaacggctattaaatctaccaatatttttctagtggcttttcattcctaccagtgcgagtttgacgcaaatgttcagtcacaatattagtcaacacttcggctaatttatcaatctgctcaacagtcacatattcgtatcggccatgataattgccaccaccattaaataagttaggtgtaggaattcctttaggcgaaataaagtttccatcagttccacctctaaaggattgtacatttggctttagtccagacttgcgataagcatcaagagccagatttacaatatatggcttgtccttaatatagttgtagatattttcatattgctcacgaatatttacagtaaatctattgccatactttttgttcatctttttaactagatcgcgaataaactgttctttacggttatattcactttgatcaaaatcacgaataatcatgctaatatcggcatgatcaacattgctttgagcatgtagaaccaagaaataaccatcatgattacgtgacttttcaggcacttgatcctgaggtaaattagacaaaaaatcattcatcaaagttgttgcgttaaccatcagaccatatgcttcaccagggtgaactacagtccctttaatatggatcgtaatctctgacgcattaaaggtatcgtattcaaaatctcctggccgcccattgtctaatgtataagcgaattctacattaggaaaatcagctggatcaaaatattgaccaccacagccaatttcttcgtctggaccaaaagcaacaaaaacatcaccgtgttcaatttcaggatgttcagttaaatatttaagcattgctaatgccccagtgattccagccttatcatcaactcctagcaaagtatgaccatcagaagtaattaaggtttgtccttttagatttaataagtctggaaactcagttggatcaagaacaatattatctttctcatctaggataattttctgaccatcataattttcgtgaatttgtggcttaatattaactgcattaaaatctgcagtatccacgtgagcaaagaagccaataggcgttaccttttctgctgtgtttgcacttaactttccaattgcaaaagctgttttttcattatagtaagcatcaagcccaagctctttcatttcctttactagttctttggccagctcaacttggccaggtgaggaaggaatctgatcatgatgttcataatatgagcgagtattctttttagctaactgaataaaccgtttttcttcataatctaaattataaaaactcattaatattgcctcttacactaattccatcgtatcacttgaaactggctcagacttggggtctgaccaccacgactctttaactgttttgataattttaaaaccatgctttgcatacagcgctttagctgctatatttgcgctaaagacttctagcctaatcggccgtctaatatttggtaacactgaagctagcaattgatcaccaataccacgtcgttgaaattgaggatcaatataaaaataagctaaattatgtggcttatacgcagcaaagccagcaaattcattattaacttctacaatcctaatctcagaatcaaagaaattataccagtatggtgcttccttaaacggaataaaatatttctccactccgcctattttcatttcttgcaaacgagccgcatcatgaacccggcacaaatcttcgtaatctaaactttgaaaacatctagttcttacttgcataatttactcctttaggtgaaagagttaataaatttttatttttctttaattatacagaagtgaattatacatttaaagattttagttccaattcaaccagtcttcatcaaaaaacttaactttttcttcctgtgattctaattcctcttgttgcatcatagctattatcatctcatctttctatttttagaccattagttcgcataaaaattatatcaaacaaaggttcatctttctactcttttttcaaaaaaatattaattgagttagtaatagatgtgaattacctatatttttatccacaatcgcgataatatcgggcttcagagcaatgtttcacgtttattgtttacatttagctgtttttccaagtaatcaaatagcttttcaccttataaaaattgtttcataaaaaaggatccaacttaatggatcccttaaacatgttattcgtaaataattacaggttcgccctttttaatattgttccaaacgcttcgaatctcgcttggcttaacattaacacaaccatgtgaaccaccttttagataagcggtcttgctccaatcagtccgccaagaggcatcgtgaaaaccacagccacttaaggtaaatggcatccaatacttaactggagaagcataacttgaaccatcatcattggtcccgcgcaatgtacttggtgattccttatagtggatataccacaccccacgcggagtttgatcacccttagaaccttccatagtaccggtaacaacatcacgaagatgaacggctagtttacccttttttatcaaccatacctcttgctttttcaatgatacaacagcataagtatcaccaatttctttatttgaatagccatagccgtgaggataagtgctgtagcctaaaccgtaaagtgcatctgcaccatcaaaatttttttggcctttggcaaatgcttcgagaagtaagcgttgcgtctttttaacataaacgccccaaccccaagtcttattctttaccgttatcgttttgcctttaactttattgccctttggcactgtaaatttatagctcttgtgtaatgttgaaacttctttatcaatttgatttaacttagtcgttaatttactagtatcaccaaattgatagcgattatctcgataagtcacattattcaataaatcttttgcctttaattgatagtttttgccattaattttataagtaatctctgctttgcttaagtcagttagtttctttttagctgtagctaaattactagtagtaaacttataagtctgagtcgatggagttttagtttgttgcttcttaaaaaaggcctttgtctcggactcatctaatgattggactgtagtgttatagctataaaccagtttgttattttttaactcaacttgatttttagctttttggttaactttagccattgccttagtaacggttagctttcctactttaactccatcgattgtaacattagggttaaagtgagttttagcatatttttctgctgcagcttgtgttgccacacggtgattatgaatgccaaaacccgcgattactccaacgataattaaaactgcaatcgttaaaataataatattgtttcgtttattctttttctttaggtcttcgttcatactatcctaccttttatgccagtaataatatctttaatatagcaccttgcaaatttcgtgtaaaatctattgatttatctaaccttttttataattagacgactagcatcccgcaaagcaaaatataaaattggtgtacaaattgcagtagaaattgaattgattacagttgcaggcaaactaacaaaggctccaactaacgctactttaaagctcgtccccaccattaaagcttcaacaattgaaacgcaataagtagtgaatatcttagttacccctgcaataatacctaaaataataatatttcttttactatcttgatagtgcattcctcgataaactgctgtcaaaaccgaagccactactactacctcaagcatagttaaccatgatgttgcggcatagccatttaacaaatcaaaaccacctagaccaataattcccgcaatcataccattacgataacctaaatataaaattgctacagcagttagcgtatttccaaaatgaataaatgggcgtcctaccatagcaggaacggggattcttaacacccagatcccaatataaataattgccgcaaaaagtcccgttaaaactaaagcttgtaaagaattcttgttttctctaaatatctgcattattaattattactccatctcttcagtaaatctggtaaagctgctgcataatttggtcctagacgtgaatcttgcttgggtgtttccctgattgcttgtgcaacaaaatcggccgcaattgaacacgctttttctaaattttctttatgcattaaagcagcaaaaaatgcacttgcaaacaaatctcccgtaccaaaataattacctgggagttttttctgaattaaagaccaactatgatcggctgtaattccaacttccgcaattttttccttattaagtgaaataccggtaattatgacattcgagacaccaaattgactagataattcagccgcaaattctgttgctgttttcaatgaattactagttgcctttttgcctaataaaaatgctgcttctgtcatattcggcgttaaaatcgtagccgacttaactagatttcgcatctttattacatagttttcatcaatgccacgataaagttgaccgtgatcacccattactggatcaatcaagatcaatttatttttttgtttaaaatagctaatcttttctgtccaaaaatctaatgctcttttgcccaaatagcctaagtatacagctgaaaaatcaaaaccaaccttttgccaatgggccataatcttagccatttcattattcaaacttaaaaaagtattctcaccaaagccacccgtatgtgtagacaaaattgcagtaggcaatacggtcgggctcaagccacatgctcctaaaacgggtaaagctgcactaagtgatacttgaccagcacaagataaatcttggctaactaatacgccaccattaaccatcttttttactccaatcaaaaaaaaacctgctttaagcttaacatgaagtttaaagcaggaaaaattttattttgcgctaaatgtattagccttgatatgattcaaaatttgataaccaatttgtttatttctgttttcatcattttgagtttgatttaagaacataatcaaaccattttgattatctgtagtcatctgaatccagttaccaaagtgagtattatataagttaccatatgctaacttcaagttatcattattcttcatatataaaccacctgaataaccatttgatgaacgtgatgttaaatgagtcatataatcaaagtctgttcgactcaaaatttgcccattggttaaaccaagttgaatacggtaatagtccattggagctgagaacaaattaccagcacctaccaattgagaagcttgagtctttttaacatattgagcccattggtaattcttttgattccaggtatatgagataccatccgtcatcccggctggaatatcttccaagaaataagttcgctttaagccaagcttattaataattcgttcctgcacattttgcttgtagctttgtccagtttcttgacgtataattccagctaacaaaatatagttggtattattgtatgaaaaattaccaggttgattttgcgtagttgagtttagcttattaacaacccaattaattgcatcagcttctgaataaacacgtcctctatttacttcagtatcagctgctgtcaatccagaagtatgcgtcatcaagttgccgacggtaatattatcagcaccttttaaattaggataccacttagagatcttagtatactgtgtaaacttccctgcagaaattaattgagtgataattgcgccggtaattactttttgcaaagaacaaacaggataaactaccttactgtttcccgcacctaatcgcttgccataataaccgtaaccataagaaatttgttgtggttgtccatcttttactataactacggtaccacgagcataataactagctaatgtatttctaacaaagctccgcatttcagttttgttataacttgctgcctgaactgtcgagctattggcattagcaattgccattccaacaggcattgaagcagctatagttaaccaaatggttgatttgattaatgttttttttaaattaatacgtttcgttttaaattcccccagcaatgttatgtaaattctacccataatattagcatttatttttttcattggggttacaattttgataaagaatcaatgagaacgtatacattttctttttctaatatggataattatttaaatgatcttgatcagtaatctgacgtattactttagccggtacccctagtgccaatgaattatctggaatatctttagtaactaccgatccagctccaataacgcaatttttaccaatttttacgccgggacaaacagtaacattgctggctaaccaacaattatcgccaacagtgatagctgctccatattcaatatcggctatttttccgcctgattgcttgcgagcatttctttgagttggcaacaaaggatgcaatggagtcgcaaatgttacgttaggtccacacattacattatttccaattgttacgggacaagtatccaaaatagtcaaattgaaattagaataaaaattatctcctaagtgtgtaaattggccataatccacttcaattggtccttgtaaatatacattttgaccatgattcggaaaaagacgatcgataattgctttccgttctacctcatcttcatcagtagtcatgttgtaatcacgtgataagcgatgagctaaaccgaaaatctttttcagttcttcagtatctgggcgatatggtttacctgccaacatttttttagtattttcttccatcgataaagcctactttctaatttaatcgcttacttaaataaatcatgtctactagctgatgtccagcttcaaaaatcggatgatcataattttttacaaaaaaatctttgatcttacctgagcgtttaaaaccacatttttcataaaaaggaatagttaaggggctatcacccgttccaacttgcaaaatttgatatttattttgatacttcttagcaataaaattaatcaaatgtttagcataccctttaccttgatcttctggataagtggctatattttttatttctactgtattaccattttcaaccgtaataacacattcagatctaacttttcctttatcaatcaagatatacataattccacgttctaaatagcgatcaatcatactctcttgttcatcagctaacaaaagtaagtctatatactgcttcttattagattttatctctttaatttccatgattattttccaattaatttaaaatttttctctttctactcatattctatgataaactcattattgttataaaaataagtataaacgaggaaaaaatgcgcaaaaaaaatatttattctatttgtatcggattaccgatctttttgattcttgcattctctattatggctcatgcaagttgggttaccggctttgacaatttctttgaaggcttagtccacagtattcctaatctgcagagcattatgcatgtaattacatttttagcagatactaaagttgacttagtttggatgctgttgatagctgtcattctttggctgaaaaagcagcgtcctctttcggcaagtattgtcatttcactagttacagctgatgcttttggttggattgttaaacatataatccaacgggcacgaccaactgctcacttagctgctgatgatggcttcagttttcctagtggccacacattaggaatggcgattattgttttctggctaatactaatattgattccagctttagttaaaaataaaactgctaaaatctggctcactgttttattagctatttggcttgttttagtaatgatttcaagagtttatctctacgctcactggccaagtgatgtttgcggctcagttgctatgggcttaatgtggattggcttagtagatgcaatttgggataaagttactccacaaacagacaaaaataatttttaagattaaaaatagtcgacgataagtcggctatttattttgagcaaaaagaaaaagtcactaaggaaaatgtccttaatggcttttctacaccttcaaatttcttcctatcagcagatgtcataagaaacatcttgcttagccttttcatcctcggagcgctcatcacacgctccgctactatgatatcaaataaaaataaaaagataaagatttttacttgataaatttcaaaaaaagtatatgaattattaaaaatcaaatttgtatattgctatcatttttaaccttttttagctctgatttaactgatttgcttttagtattgttaattgtcttaaaaaaggcggaaatttggccaatttctttttcggtagtcgaacaacagccacctattattctagcaccatgttcataccactcttgacttaactttttaaaatcgaattttgcattaaatggaatccaattgcgctcaaattcgttataaacgccacccaagttaggataaatgacaatttgtttatcagtaaaatcatgaattttatcaatcactgcagttgctaaaaacggtttaaagcaattggctccaatcgcaaatacttgatcatattcattaagcttttgcactacccgctttaaaggagtgccatcactaattttagttgtatcatgcaatgtaaaacttacatacactggaaattccggagcattttcctttaaccaatctaagattgctacaacttcatccaatttaggctgagtttcaagtgcgagacaatcaggtttatttgccaataaaatcttcaatcgtggtaaatgaaaattaagatattcctccgttgttagagaataatctccgcgaaattcatccccttgagctaaatatgcaccataaggtcctactgaagccgctacataattatgaattcccgttgtctttgcaaaatcatcacgggcttttttggcaatttgaactgcattagtaatcaatttagtagcctggtcttgtgtaaaaccatgtttttcaaaagctgggatatttgcttgataagtatcagtaattgccatctgggctccagccttaaaataattcatatgtacttgataaatttgagcaagattatgttctaatgcaattgctgtccaaagttcattatttgtatcaatgcctaacttctcaagagctgtagacattgcaccatctaagattaatcctcgatcacggatctgtttgagcaaattcatttttctcaccttagtataaattgagtagatagttaatttatatttaatattacattaatcttagatctgtttcaaatattatttcttcctatgtcttattttttagctacagtttgctataaatttatttaatgctattttcatataatattaaaatagatttttgaaatcatgtaaataattagccaaatagtgtgccgttaaactttcaggcttttgctttaattctaaaggcttaccctcttggacaatccgaccaccgtttttaccaccacgtgggcctaaatcaatcatgtaatcacaattgacaattaaatttaaatcatgagtgattgtaataatggtagctccctgatctaacaacttttgcattacttggaccagaaccttcacgtcaagaggatgcaagccaatcgtaggttcatcgaaaacaaacaatgtatcattttgtttatgactaagatgagtaacaagtttaaggcgctgagcttctccacctgacaaagttggtgtatcttctcccaaatgtaagtaatccaagcctacttcttttaacaattttagctctcgttcaatcttaggcactttaacaaaaatcggtagagcttcattaacatctagatttaggacatcaacaattgacagatcatgccacttcaccttttgtacatcttgattataacgatcgccatgacaggttggacagacttgttgcatatctggtaaaaattggatgtcaagagtcacaattcctgtaccaccacaagtaggacaagctccttgtttattattatatgaaaaccaacttggcgtataatgcttctttttaacgagtggctgactagcatataactttcgtaaattgtccataattgaagtataagttgctacagttgaccgagtacttttaccaattggagatgcatcaacacttactacatttgaaattgggctagaaaagctactaatttgttttggcaatttttcactttttctttttgctataatagcgggcactaaactatccaaaatcaaactagttttaccggcacctgaaaaaccagttactgcagttaattggtttagtgggattttagtttttacatcatgtaaattaaaatattgctttacttcaaatgaaatagaatcggaatttatttgattggctggctctctggcaagtagcttagcactgccatccaaatatggtcgaattaaagaatgctgatcatgtttgatcgcagtaattgaatcttgatccaaaatctgaccaccttttttacctgaacctggtccaatctcaattacttcatcagcggctttaataatgtcaacattatgatcaacaactactaatgaattgccctgagcaactaattttcgtaaaaccttaattaatcctgcaacattagcaggatggagaccaatagaaggctcatccaagacatataaaactccagtagtttcagtacgtaatgttcttgctaattgaattcgttgcaattcacctgtcgataaggtatttccacttctagccatagtcaaatagtctagccctaagtctaataatggttgcaaattatccaaaaactcctgaataatcgaatgagccattttatgcatattagttggtaaagttgcttgcacatctttaacccaggtaactaaatcacctaactgcatttcggccacctgattaatattttgcttaccgatcagctgttgtaacaattctggtttcaaacgactaccatgacaaagtggacaagtcgaataagtaaagaattcggctattcttttttgcgcacgttctgatttgctactctttgctgaacgatagacagcttgccgagcattttcatataaggcattaaaatcatgaaataccctgccagttcctgataaaaagtccattttatatttcttttcaggaccatttaagacaaaatctttttctttatcagtaagatctttataaggaatgtcgatcctaacaccagcatgttctgcaacgttaggcataaagttccgtcctggcaagctccaagatgcaactgcaccatctttaattgacaaattttcatccgtaatcagtttagattcatctagttgccgtaccttaccagttccgccacactcagtacatgcaccatctgaattaaaagcaaattgttcggcacttggtgcataaaattttacaccacagactggacaagttaattgtcccatttgctcacctgacatactcattgcctttgcaattgccaaactcggcttcaagcggtgtccattaggacaaactggagaacccaaacgagagaaaattaagcgtaaaacattaaaagtctcactcatggttcctactgtagctcgctcatttggtacacttggacgctgccgtaaagctaatgcggagggaatatgtttgacgctagttacatcaacctgatttccctgtttaattcgcctacgcatataagttgacagagcatcaagatagcgtcttgaaccttcttcataaagaatccccattgctagtgatgattttcctgagcccgacagtcctgaaattgctacaaatttattcaaaggaatgtcaacgtcaatattctttaagttatgtactcgtccgccacgaacttcaattttcgttggaatagtcattaaatatccctttccatatttagtcattatctattttaatttataatcatgaattaccaacaagcaaaccaatttttgagactgtaaaatagtttgtgtaaggatgaatgattccttaaatttatttctttaaacattagaaaaaggagttcctttctcgtatgattggtttgaacaaaaaaacacatacagaaagaagaactccttcatgaatgattttaccaaagattttgctcaagctctattcaatccagacaaaataaatgatttattgcgcaaagagctacaacaggctgttaataacttgttagaagctgaattgactgcctttctgggctatgatccctatgccagaaatggctggaatactggcaactctagaaatggtgcttatttccgcaaagttgatacgcaatttggcccaattgaagtgcaagtgcctcgggatcgcaacggtcaatttcatcagcacacgctgcctgactacaagcagcactcggatatcttggaaagcatgattatcaagctttactccaagggcgtgaccaccagggaaatagccgatctaattgaaaagatgtatggcagccattacagtccagctcaggtatcaaatatttccaagcagatgattccaaaggttgaggcttaccacaaacgcaagctaagcgacaagtttttctgcgtctatttggatgcgacataccttcctttgcgccgagaaacgtttgagcgtgaagcagtatatattgccattggcattaaacctaatggacataaggaagtcattgactactgcattgctcctagtgagaacattgaagtctggacagagatgcttcaaaacatggagtccagaggcttgaagcaagttgaactctttctttctgatggtgttgttggcatgaaaacagccttggccaggacttatcctaaagctcattttcaatgctgcctggttcatgtcatgcgcaatatctgtgctaaagtccgggtggatgaccgcgaaaagatcatgaacgaattcaagcagatacatcaacagacaagccaaaaagaagctgcagctgtcttgcacaaattctatgccagatggaataaagcttatagcaatgtcatcaaaggtttgaaggaaattgagcccgatctgctggtcttctacaattatcccaaacaaatcagagcttcaatttattcaaccaatatgattgaatcctttaacaacgtcatcaagcgtaaagctaagcctaaggcagaatttccaactgaacagtcgcttgatgcatttattggcatccaggcaatgagctacaatgaccgctatttcaaccgaattcataaaggctttggtcaggttcaggataccttagaatcctactttgattaaataaataattaaaaaatcaatttgcgagaaagaactatttacacaaaagatttgacaggttccaatttttggaaaattatgacaaaattactattaaaaatatgtgttatatgatatattataattagataaagtaagcgcttacttttaaaagacatagaaatgaggtgttgttgtgatattgattaaagaaaccgctgttttttcttttgatagatataaaaataccacatatttagagacacccatcaagctaggagtcatgcgtaacggcgcttgattcgtgtcctaaataaaaatgagggttacattttgtaactcttatttttgttcttaaaatacaaaagaaaatcagtacaaaacacggagtttgtactgatttttaatattctaaaggttaattatttaacccaatcgcggacttcactatcatcacgtgcaacaccaacaacattcagaccattagcccattctttaaagtgactgacataagccttatggttagtgcctgctgaggtaaagaatgatgcaacttcaccacggtagtttttcatcttttcaagtaatggcttaattggagttgcaggatagcctgaccaaacagggctaccgactaaaatcaaatcataattattaaaatcgatatcatccatttgaatttcaggataaggaaccttaccttgaatttgatctagagcaatatcgttggtcttgtacatatctgaatcaaaagcgtcaggagcaacagttacttcctttaattcactgttttcaatttctccgttaatctttttagccatgttcttggtattgccttcccaagaataatagataattaatgtttttttagccataaatttagtccttctttcatttacatttattgtaataaaaaaagaccggtttgaccaatattttaatattattattttagctattttccttttcttttgattatttccatcatagcctgaccatactttttcatcttcgcttgccctacaccacttacctctaaaaattcactttcattttgtggtttaatttgtgccatatcgtgcaaagagcgatctgaaaaaatcataaatgctggtactttttgctgcttagctaattccaaacgcttttgtcttaaagcttcaaataaagtatcactttcttcaccagcatgagtagtagttactgaaatcttagcaattcgccgtttgactacagttttgccatctagtacatcccacccatgattagttacatgcactagtggatatttgctaccttcaacttctagataacctgaagcaattaaatagtcaatcaagcttatagcatctttttgcttcattcttagagagccaaaagacttatattgtgtagcattcatttcttgcatgcgctgattttttgagccaatcaaacattgagcaactatcgtttttccaaagcgaccatctagttcataaaccatactaatcactttttgagcatcaatggtaatgtcagtcaatttatcctgatttagacaatttgagcatttaccacatggcggacaatcttgaccaaaataacggacgataaattgctgcaaacattcaccagtattagcataatcagtaattgtttgcaacttacgatattgcagttctcgatatttatcatccgcatctgattcatcaataaagtagcgatattgacgcaagtcaccaggatgatagattaaaatcgcttcgctttcttccccatcacgacctgcccgacctgcttcttgatagtaactttccatattacgggcacttgaggcatgaatcacaaatctgacattacttttatcgatccccattccaaaagcattagttgctacaattacttgaaattcatcaaattgaaaagcttcttgtacttgacttcgttctgaagaatccattccaccatgataagcaccaacagagattcctttcttagccaaataatctgtcaaactttcaacttttttacgtgtattagtgtaaataatccccgctttatcctgatgtgccttaatatattctgaaatatataatggagtattttgtggtgagttgaccactttaaacgatatattagggcgagcaaaagaggtaacaatcatattctccttgggaatattcaattgttcacaaatatcatcttgaaccgcaggcgtggctgtcgctgttaaagctaatatatttggtctgctttttagtgaattgattccatctaataattgacgataagcaggtcgaaaatcatgtccccattgtgaaatacagtgtgcttcatcgacagcaactagatcaatatctaaaaaatttaactgatatctaaaataatcaatcgctaaacgctcaggtgtaatataaattaacttaattttgccttcatatgcctgacgtaaaattggattaacctcttcttgcggtgtagtagaatttaatgctgccgcattaattccattttgctttaaattatcaatttgatctttcattagagaaattaatggtgaaataaccaaagttacaccgggattaatcaaagctggtatttgataacacattgattttccgccaccggttggcataaccgctaacacattttgcttttttaaaactaaatcaattacttgtttttgacctgggcgaaaatttgtatagccaaatgtatcttttaaaacttcttctggattcataaacttatcctaactagttaaattgctactttttattctaaattaacaattcaccccaaacaagataaaaagattcacacttttaaataaagaaaaatgtgaatcttttagagttaaatttacttataaaaggtttcttctactgcatgagtaatcgcaatcttatcatgagcataggacaaaccgccctgaatataaagcatgtatggttcacgtaaagggccatcagaagaaagctcaattgttgatccttcaacgaaacttcccgaagccataacaacttcatcttcgtaaccatcctgatgatatggaattgggtcaacaaatgaattcattggtgaatagtgttgaatagccgcacaaaattttaccatcggatcaggtttaccaaaagtgacagtttgaacaatatcactacgtggatcactccatttaggtgaaacctgcatccccatttcttctaataaggctgcagtaaagaccatacctttttgagcttcaccagtagtatgagctgccataaagaatccttggtagatatcacgcaaataaccccaagttgcgccttcaccttttccagctcctggcactgtcaaccgtgaaccagcaccatcaattaaatcctgccggccaactaaaaaagcaccgccttttactaaacccgcaccagcatttttataaagagaaccagccattaaatctgcaccatagaaagttggttcttcacattcagaaaattcaccataacagttatcaatgaaaatattgacatcgggacgaacttccttaataaacttgagcattggcttgatcttagccatggtaaaagtcttacgagttgcatagcctaatgatctttgaattgccactactttaattgaaggatccatgatatcttttttagcttgatcataatcaacctcgccgtcttttaattctgtagtcttaaacttgatgccccattccttcatgttgcctggtttattgccagctaagccaataacttcttgaatagtatcatatggtgttccagttaaataataaagggtatcccctgggcgaagcatgctgaaaagaccaactgtaattgcatgagtacctgagccaaattgtggacgaactagagcatcatctgttttaaaataatcggcataaatatcctcaattttatcacgacctatatcgtcataaccatagcctgttgatggaactagatcttcttcaccaacatgatgttttctaaataggtccaatacacgttgttgattatacaaaacctgttcatcaattttttctaaacgaggttgaatcattgattcaactttagtcactttatcgcttaactcttttggtaaattctctttccaagaaaaactcatttttaactccctatttatttttgattacttctgcttgtacgcataaactaccattattattttcgctcagatatactccctgaatctctggcacaaaaccaggaaacttttcaatagcatgcgccaagacttcaaagtacttttgatctaccgttccccacttttcaccgggtgcaacaatgaaaacacctggaggatatggcaaagctccttcggcagcaattcttccaacaacattttctaggttgaccagttcattttgatcttttttaaaaagctgatcagctgtagctggtgtcatttgatagtcttgcatccctgatttagaaaatagcttttgctgtaatacaaaagtattattttcctgatagtactcatgcatttcttgacacaactgtttcagggtatagccttgataacgctttggatactcattatataaaaccggcaaaacatctttcattaagtcatcttctagatagtgtttttcaaaacttaaaaaagcttcaagtaaagtatctagttctgcttgactatctcccggtgtaagtaaaaacaacaatgaattcaaatcatttttagctcgaataatatgattttccattaagtattctgccactaccgcgcctggaatacctactttctcatattttgcatttttaacatcaattccgggagtttttaccgtaatcttcaatgggtcaatcattgcttcgcctggaaccattttacggaaaccgtgccaatccgtattttgtcccatttcccaatattctgcattggtagccaattcatcagtcgaaatttcggcaaaattgtcaggaactaatggcttaaatagcttagactttttgagtagttttttccgccattcaattcccattcgcagagtttgatcccaccactttttatttcctgctccagcagtaacgtaggaattaactgttaatgaagcataaagtgggtatgcataactggaagtaacaaacttcagataagcatgattaaagtgcttatgatcaacatatcgtttttgtcctttaatatgagcatccttttttagaatctgtgacgcttgagccatacctgcttgctgtttatgtaatgactgagtaaccaaaatacctggatcatcaggacccaagttaagtagaagtggtgataaatgtctcataattggtacgaattcttcaaagccgccccaggcacagtcaaacagaacataatcacaaagtttaccgattcggtcaataatccattgtgcatcataaaagactccatcataggtttctgcttgtacgattgctaacctaaatggacgcttagcctttgcctttgccggatctatcttagctacttcagctctaattttatcttcagttaagaaggctggatccatttctccaattagtccaagtgcatttcgatcagttggaatgtagaccggctttgctccgctcattaccaaggcagaattatacaaagatttatgattatttcgatcaaataaaactagatcgccttcagataaaagtgcacttgcgcaaatagaattagctgaagtcgttccgttggtacagaagtaaaccttatctgcatgataagttttagcagctttcttttctgcattaagtggcgttccagcatgcgtcattgtatcccctaattgaggaacagtatcacttgtatcggcaaacattagatttttaccaaagaacttattaaaaactactccggcaggatgtttatcataatattgcccattatggtgacccggtgtagtaaatgaaattggttttgcttgagcaaaattgatcaagtcggtcaaaaagcctggcaccatttgcttttcatattctgtagctttcggagtgacttggtcttcatctacctgatcagttactttaatcaatggaatcggaaaaccagattgttctcttagagcttctgcttgttttattcctaatgcatcatcatttttgacaacaattgcggcaagttcagcactattttgtacatcgccaattggaattgacgaccaacctttcatcttattaacattgacgccatttccaatggcaattttcaaaaaatccatcctttttctttccattttgtccacgaaaccgttttacatattgcaaaactttaaaaagtctttataatttttctacagtatagcgtactttttgcattctttcttaaaatacgctacagctgaaattattatataaatattggaggtttttaacaagtgcatttgccttgctcgcctccgagaacagctatgtcaacacaacaataaaatagcttaacttggaggaatttttatgtcagaaacaatcgaaacagtcaatttcgaacccgaaaaaaaacactacatgtcatggccggttattgcattgatcgacttcgtaacgattatcagttttgaaaatattttttatccatttcaaaatcaaggcttatcagtagttgtatcttggattttcctactcttcgcctacgttattccttatgcattgatgtctagtcaaatgggcctaacctttactgatcaagccggtggattggcatcttgggtacgtcattcatctaacgatacactgggctactggacttcatggatgtattgggttcaaactgttccttatttggtcgatgtttctaattcagttattgtgtccttttcatggattattttgggcaacaatactttagacaagcatatgtctactttttggtttgggattttgacctttgtcattattcttgcctttattttggttgaaaatgcaatcaagaattcacttgaactactatctttaattggtggtggtgcaatgtttattatgtctatgctctttgttttacttgctgtttggtcagttatgcatggacaccatattgctacccaaccatttaacttggccgcatttaagccatcatttagtttacgttacttttctaccactggtcttctaatcttcgccatgtctggtgcagaacttgctgctccttatatcgtacaaatgcgcgatccaaaacacgaatttcctaaagcaatgtggatgttagctttgatgactggattcttgactatcttcggtactttggctttagcaatgtttttcaatgctcatcatattccacatgatttcaagatgaacggaccttactatgcatttcaactactaggcgaaagccttggttggggcaaagtattaatgtacatctttgctgttgttcaagccctctttatgatggcccaattagcagttttacttgatgcatcaagtcgtgtctttgccggtgacgttgccgacaaattcatgccaaaatggttaactgggaaaaaagacaaaacaggtcgtccagttcactcgtacactttaacttgtggtttagccttattcttgcttttacttactgggactttgccaaatattaattcaatttacaattggcttttaaatatcaatggtattatttccccatacaagacttgttgggtattcttcgctttcattatgttacggatgcaccaagagaagttccactcagattatgtcttcattaaaaataagactggtgcccttataatgggctggtggtgcttaatctttacctttatctgtgctactttaggatttattcctcaagaagcagaagcaacattcggtagtgcagcctttaatcaccaattaattatgaatattattacagttatcgtactctttggcttaggcttcttactaccatacttaagaaaacgcgaagaacgtaaagaaatgaatatataaaataaacatgcttcgatcagttcgaaaatcgaggcatgtttattttattattctaagatttcaacctgcatcttactaggaacattaacaaagtcgaattgtttttgaaaaacatgatcaaaccgtaaatcataaacagaaccaataattggtgttaatgcaaaagctcgtaaagtgttcatatctttagttttattagcataaatatgatgcatttgtggtttgattttataaattcgttctaaatattgtggacttacctcatcaacatagccttctagagtgaaaccaatgctagtgagagtttctcttccgcgcaaagcggtaattgaaactttattgtgtcccttaatatggcgataaaatgacttctgattagtcgttgcaaaaataagacgaccatcttcattaaagtcaatatcgataatattggtatgtggatcaccattttgatcaacggtaccaaaaattactgaatggaaacaatcaacgattagatctaggaattcgtcgttacttaaattacgatcgagttcaggaacatgttgtctcatattaatctttccgtttctatatactttctgtaatttttatctatattatttcttatagtgtacatgacacaattaactaaaaacaactttaatgctcattattttcccattttaaatgtataattgtttaatattaatttttctggtaaaattttagctaacaaaaaataagaaaagaggcagaatatgaatatagattataagaaattggtccaagccaaaaaggacgacattcttcgtgatcttgacgaattaatcgcaatcgactcatctgaggatttgaataatacttccgaagagtatcctgttggtccaggtccagttaaggcaatgaagaaattcttatcgtttgcacagcgtgatggtttccatatcaaaaatgttgacaattacgctggccgtgtcgactatggtactggtgaaaaacgtttaggcattattggccacatggacgtggttccagctggtgacggctgggtaactgatccttttaaaatgttaattaaggatggtaaaatcattggtcgaggttctgccgatgataaaggtcctgccctagctgcatattatggcatgcttttacttaaagaagctggatttgaacctaaaaaaaagattgattttattgtgggaaccaatgaggaaactaattgggttggcattgattactacctaaaatatgagccaacccctgatcaagtattctcacctgatgccgaatttccaattatcaacggtgaacaggggatctataccctgaccatgacctttaaagatgacaataaaaagggatcagtagtccttaagtcattcaaggccggcattgccgaaaacgtaactcctcaaaaggcctatgcaactattgttggtagtgatttagccacaatgaaggaaaaatatactaagtttttatcagataataaacttgaaggcgaattcactattgagggcgatgaagctaagattgaattaactggtcaaggtgcccatgcatctgcacctcaagttggtagaaatgcggctacatttttggcagtatttctagatcaatttgattttgctggtcgcgatagaagctggcttcatttcttagccgatgttgaacatgaagactttaacggcaaaaaattaggcgttgctcatcatgatgacttgatgggtgatctctcaagtgctccatcaatgtttgactacgagaaaaatggaaatgctgttttgaaagataatattcgctatcctcaaggtactgatccagataagatggttaagcaagttgaagaaaaatttggtgatatcttaactcaaagttttgcttcatttgaagaacctcattatgtacctggagacgatccattagttcaaaccttgctcaaagtttatgaacgccagactggtaataaaggtcatgaagtcgtgatcggcggtgggacttatgggcgtttatttaagcatggagttgcatatggcgctcaacctgaagatgctccaatggttatgcaccaagcaaatgaatatatgaaggtagatgacctaattaattcaattgcgatttatgccgaagctatctatgaattgaccaaggacgccgaataaaaatttttacatgtatcaaaaaagcttatatactgatcttgttttaatgcagtatataagctatagaaagttgctagtgtcatatatcactagtgacttttttatttttccaataaaacttcttcattatttttcttagattttagccaaaaatgatgtcccaagtaacaaatagctacaaaaggaattgtatagtacaatgctactctttgagttggatcgaaccagattaacacacaagaaagtaggcttgatataaatgcaaaatatggaattacaggataccatgggggcttgtacttcaattcactgagttgatgacctgagtttaaaaatgcccttctaaacttcaattctgaccatgcaatcgccgtccaaacgaatacaacagctaatccagaaatagaaactaatactagataaaccgtcgaggcagcaactttactagaaatcaaagcaaaaattccgcctaacatacttactactaatgacaatactggaataccacgcttattagttttggtgaatgctttaggaattgttccttcgttgcccaacgaccaaagcattctagttgaagcatacaaaactgaattggccgcagaaataattgcagtcaaaactacgaagttcataatatttgcagcaaatggcacatgaattaggtcaagcacatacacaaatgggctttgagttactccagccgtatgataaggaattaatgcagccataactacaattgagccaataaagaagacaattaaacgccaaagtgttgtcctaattgcttcaggaatagctttctgaggattctctgcttcaccagccgtaatgccaataagctcagttcctgaaaaagcaaagtttactgttagcattgttgtaaatactccaccccagccgttggggaaccagccatttttataaaaattaaccaatcccaatgtgcttgataaactttgctcaactgatcaatcaaagctgttgcggtccataatttattattagtatctacgccttgtttttccaattcatacgacattgcaccatctaggactaatcccctatttttaatctgttcaagcaaacccatttttttcatgctgtcaacattattttagtaaatttcctaaataatagccgcaataaactagaaccaagccacccagatatgatgacaccgcgtagaatacaagaccacgataatttttactcttataaagctcaactaattctgtattcatagtggaaaaggttgtatagccacccattactccagttcctagtaatgcataaataaaagtgttagcaccaattccaaaaatcaagcctaaaattagtactccagttaagttaataaacaaagtcggtgtaggtaaattagaaaatttattaccaatccattcccaatgctttttaccataattagtaatagcataacgaagcatagctccaattgatgcaccaattcctgcaagcaaaaaattcatcgtgtattcctttcctttcttactaattgaccaacttttttaccaattttcattcctaacatagcaaaaacaaagccaaaaataattgagctaaagtaataaattactgcttcgattggcaaattagcctgcatattttttaaaacatcaagattaaaagttgaaaaagtagtaaatgcacctacaaagccagtacctaatccaactacaagccactgcctaatctctttagtttcaataaaaaagtaggtgaaaaacgctaataaaaagcaacctatgacattaccccaaaaagtaccataatagctgaagtttgcatttaaaccagcacgtgccataccaccaaaaaaggcgaaaatagcgatactaatgtaattaataaattttgaattcaaacagattcctcccacaaaaaaacgtctactctacccctatcggataaagtagacgtcattagattttactcggttaatggcgaacgtcatcgcctattcagttaacagttatcatcatacgacttttctgtttggttggcaagttgtattgtgtgcgtgtcgctttgcgacacgcagtttgattatttaataaaaaatttagtaacaacgtgcttgaaataatgtataattatttttaacgaatgtttgaaaggagcctcaatcttgacttttccatatgaagataaatttcgcatttactgtaaacaacaaaagaaactagccgattcaactatttctctagcctgttcttcaatttcaactttttgggattattattctggtagtttagatgctactgaagcaaatgtagaaaatgttacaactggagatatacgtaactttttagattcacttgaaaataaactccatatgaaaagtaatacagtaaataaatatcttagtcacataaagatgtattttgtttttttgaatgaatatggctacatcattacttatccattgctcactttacgtggtaatcgcttcaatcgtaagcaacactatgttattggctgggaaaatcatttatcagaattaattcaaataaaaaatattcatcctgaaactatcaagatgatggctgctattgcttgtggttttaagccaaaagaaattatgattttgcatgtaaatgaattgttggtaaaagttaaagaaaatgatgtcagagaatatatccaaaatcacactaattttgccaataacgataatccctatctgtttgctcgccgcgatggcaaacattacgcttctgattttaatattaaccaaaaaattgcccctgaccgttcaatagtcggcatgccattaactacacataagcttcggatgtcttatgtctactctgttttgtctaattcaaaattaagagaagcggattatattgaaaaattacatctttcaatgaaaactttaaattactatcgtaaaaatatgacactctatgtagaaaccagtaaatttgaattaaaaaaataaacaagcaaaaacgactacccatttcgagtagtcgtctttgtttgttgaaggtgaaatttcaacaaatctatcttagtcagaacttggagttatctattagtaccagccatttgcttgccagaaacttttagcagcgctccaagagccatatctagatttgacataattatccgctacacgttcttggttagcagctgaataatcaccattcaaataagatgaagaaagttgatacttacctacatattggccatttctagcactgtatgagccaccagattctttgcttgcaatccatgcctttgcactagcttcggaacctgtcgcggttgatgaatatgaactagttgttgtcgtcttaggtgtgtagttcacatttgaataagtgtatgaactttgactttggctagcttgtgtagtttgttgagctggcgtttgtgtttgagtgtaggtattttcttgtctagcttgagtattttggctagtagtataattagttgccaatacccattgatttaagccaagatcataccacttctgtccctttgaatcataagcagtttttataatcttccagttagtacctgcagctagagtttgaccagttgcaactggattttcatagttattgtaaacggtagtagcttgtgtagttgtatacactgctgcatcattttgcacaacggcagcttgtgcttcattattatctagttgattgattgcaccaatacctgcaagtgataaagcagcaacagcaatagtcttagttaaaatagatttagttttcaaaaaacatctctccttaaattaaaacgtcaattactattcatcatttttgttttattattctcttgcaattgacattttatataatacctgcttcgagttgcagttccatcacagtcagatcacacaatgattaaagaaaaatgttttttcgtaacagttggaaatatttttaataaatctagatttctctgcaatatttgtaaaaatcatgcaatatatgaacaaaatttgacgacaaaataagcatccctacgccataaaagatcgttttagggatgcttatttaattaataatctaattcttgatccatacttgcaggccagccaccaataccacgtttttgatcaaggccacgcaatgtctccatctcttcagcagtaaattcaaaatcaaaaatatccaaattatccttcatgtgtaacggattcgtcgagccaggaatagtcatgatattttcttgtaccaagaagtgtaacgcaatttgtggcactgtcttattatacttctcagccaaagaaagtaaggttgggtcattaaataaagccttcattccttcaccgagtggtgaccaagattcatgtacaatattattttcaattaaatatttatgcattttcttttgttgcttaaagacagacgtttcaatttgatcaactactggcttagtatcgaaattattcataatttcatttacttgatcatggttgaagttactcagtccaattgaacgtagctttcccacctgatatgcctcctcaagtgcctggtaagtacctaaactatcagacataggccagtgaataatcattaaatcaaaatagtcttgctgggcgtgaattaacgattcatcaatcccattcttcgtctctctataaccacttgtttgcgctttagtggtcaaaaaaatgtcttcacgtttaatgccgcttttgttaatagcattgcctacttctgcttcattactgtatgcttgagcagtatcaattaaccgatatccagccttcaaagcctcgacaaccgctccttcagtaattctaggctgaattctatatgttccaaagccgaagattggagtttttacaccgttattaaaagttaaatatttcatttttattcctcaatattttattcaggatcagatgcagagtgataagtaatactaaatccagcttgatattccttacctggctccaaatgattcataccatatttgtgctctagctcaccatcagcatcttctctatctgcaattccccaccatggctcaatgcatacataattagcggtatttggatattgtgaccaaatgccaacatatggtgcatttctagtccaaacattgatgtggaacttactcttatcagttctcaaagatactttattgtcatgaccatgtaattcataaatcaaggcatcatctttaaatagctcatcacttaaaccaataaaactatcagtcgaagctagagaacgattattccagtcaagatatgctcctttaagtgggatttttaccctagcaatagatggatgcatatcgaaataataatcttctttctcttccccattatttactggtaagttaaatccagggtgaccacctacaccaaaaatcatagtttcatctgatttattaactacgctaaagttttcttccaataaattattcatcaaattatagttaactctgaattcaaatttaaatggatacatttcacgcgttttttcattatctttcagtaagaacgtgatactttcttgtgtatgattctccacttcaaaatcacaatcacgggcaaaaccatgctgacccatatgataggtcttaccttgatacttatattcatcattcttaagtcgccctacaattggaaaaagtacaggtgcatgtctgccccagatctctggatcagcttgccacatatattcttcaccggtatgagctcctttaacgctctgaacttcagctccgtgatccgaaatcactacttcgatcatattattcttgattgtgtaatccataactaaatttccctctacatatcaaacagttaaaaatcataatgtaatcgcttaattacttatattttaacattaatgcgtcaataagccagaataaaaacaaaagaaaaaagcattcaaactttgaattgaatgcttcattcgtgattctttgatcaattagagaataaatttagttaagtctttattcataataatatcgcctaacttatcttcaacataggcttcagtaactgtgatttcacccatttccatatcaggcccttcgtaaagaacgtcttctaagagcttttcaagaatagttgaaagtcgacgagcaccaatattatcagtgccttggttaacatcaaaggcaatctccgcaattttatcaacggcttcttgggtgaaaactaacttaatgccatctgccttcattaaagcaatgtattgcttaagcaatgaattttgtggatccttcaagatcttgacaaaatcgtccttggttaaagcgttaagttcaacccgaattggaaaacgtccttgaagttctggaatcaaatcactaggcttactttcagcaaaggcacctgcagcaataaacaaaatatgatcagttgaaactgggccatattttgtatttacagttgagccttcaacgattggtaaaatatctctttgaacaccttcacgagaaacttcaccagaattacgtttattaccagcaataattttatcaatttcatcaataaagataattccgttattctggcttctttcaatagcatgttgatagatagcgtcatagtcaactaacttacgtgattcttcttgaatcaaaacttcacgtgcttcttttactgataaagtacgcttaacctttttcttaggcataagatcactaagcattgagcccatatccatccccatttgacccatcatgtcactcattgggttggccttaggagcttgttctacctctatggtaacttcgtgatcttcaagtaagcctttagctagcttttcagccacatccattcgtttgtttcttacatcagcagaaacatcctcttcatgatcttcttcgcgattattttctcccatcaacatagacatcatatcttgcatttgctgcatttgattttcacgacgttcatgtttctctgctggagctaacaaacgaactaattctttatttgcttctttagttgcttgagtctttacacgagcaaattggtccttttcttccattcgtacggcttcggaaaccaagtcacggaccattgattcaacgtcacgtcctacataacctacttcagtaaacttcgttgcctctactttaacaaagggagcttctacaatatcagctaaacgacgagcaatttcagttttacctacaccagtaggaccagccattaataaattcttaggcgttacttcacgttgcatttctttagataactgcattctacggtaacggttgtaaagagctatcgcaactgattttttagcttcatcttggccaataatatattcgtttaaaattttaactatttcttttggggtcttaatagccatttccttcactcctaaatttcatcagtgacaattttatcatcagtgaaaacatcaattcctgaagcaatctttacagcttcatgtgcaatttcatcggccttcatatcttttgcgtgtcgagtcatggcaatcgctgcggcttgagcaaaattaccacctgaaccaattgcaactacgttttcatcaggttcaagtacttcaccattacctgaaattaaaagtaggtctttgtcatcaaaagcaatcaacattgcatttaatttttgtagagttggatccttacgccatgcttgagccatttccacggcagcacgacgaagatcgcctgagtagctttcgagcttgccctcaagcatatcttgaaggctgactgcatcagctacaccaccggcaaaaccaattactacacgatcatggtaaatacgacgaatcttacgcgctgttgccttggcaataactttttcgcctaaggttacttgtccatcaccggcaattgctgtttttccattaaatcttactgaacaaattgttgtcatgttaaacctcaactttctttattacgaggaaaatatttttgataatctgattttaaatgagccattgttacatgagtatagatttgcgttgctgatagactactgtgtcctaataactcttggacacttcgcaaatctgctccattattaagcatcgcggtagcaaagctatgtcgcaactcatgtgggtgtactttaccactaattcctgcctgattaaaagttttttgcattacagtttcaattccgcggctagtaatgccagttccttgattatttaaaaatacatgctgttcatcatcatttttaagtaataatggacgtgcattttctaaataagcaatcaaagatttttttgttttatcatcaaaagcaacatagcggtctttatttcctttaccgtgaaccaaaattgtctgtaagtctaaatcaagttgattcaaagtaagattactaacctcacttacccgcatccctgtcgcataaaacagttcaaacattgccaaatttctcatcgtcaaaggcttatttcctttcaatgaatcaaaaacctgctttaattcaggctggtaaaaaaattgcggtaattttttctcaccacggcgtaaagtaatacccttagttggatcgattgccactagtttgcggcgggttaaaaagcggtaaaaagaatgcaggctggacatcttgcgcaactgactactacgggctaacttgcgttctgctaaatgttgtagataaacctggatatcacgttctcttactttagtccaacctgggaatccaccattttcatgccaaaacctttccgcttcatgcaaatctgtttgataagctaaaacggttttcgcactataatgacgctcattttgtaaatatgataaaaattgatctaactcactttgcctttggttcattaatctaaaacttccgtcttaaattcatctaaactagcaagaccacgttcactgaccttctcatggcgctcacgcttcttgcgaatcttcttaccctctagtggaggtagcaaagcaaaactagcattcattggttggaaatgtttagcactcgtagtagttatgtagttagccattgagcctaacgcagtatcttttgggaaagccacagtatctttccccatagcttcacgtgctgcattaattcctgctactaagccactacctgcactttctacatagccttcaacacctgtcatctggcctgcaaaaaataatccaggctgctcttttgcctcgtaagaagctgtcaaaacttctggtgaagccatataagtattacgatgcattttaccataacgaacgaaacgtgcattttctaagcctgggatcattgaaaatactcgtttttgttcaccaaatttcaaatgagtttggaaaccaacaatattatacattgaagctgcagcattatcttggcgcaactgtacaactgcataaggagttttgcctgtatgtggatcttctaatcctactggtttaagtggaccaaaaagcattgttttagccccacgcgctgccattacttcaattggcatacacccctcaaaaacatcgctattttcaaaaccatgtaattgcgcagtttcagcgttaattaattcctgactaaacttttcatattgctctttagtcataggacaattcaaatatgcagcttcaccacgatcataacgcgactttttataaacaattttcatatcaatcgagtcagcggccacaatcggagctgctgcatcaaagaaatgtaaactatcagttccagaaaatttttgaatctgtccagctaaagcatcactagttaacggaccagttgcaataattgtaatcccatctttcggaatttcagtaacttcttcttcgtgaacagttacattctctaacccacgcaaagtgtcagttacgtatttactgaaactatcacgatcaacggctaatgctccacctgcaggcacttgagttttgtcggcagctttcatgatcaatgaatctaaatgacgcatttcttcttttaaaagacctacagcattagataattgatttgatctcattgaattggtacaaaccagttccgcaaattcaccagtttcatgagctggagtctccttttttggtcgcatttcataaaggtcaacatgaataccacgcttagctaattgccaagttgcttcactaccagcaagacctgcaccaataactgttacattttttggcatttactcacctatattttctatgttaattgtttttttcgttttcactgtcttcacgataatcaccgttaggacaaagaatcactggaccttttttagaatgcttttctactaaaaagtggccatcatttggacaatttctgccaattggcttgtcccatgagacaaagtcgcattctggataacgagaacagccgtagaatttacgatttctacgtgatttcttttcgacaacctgacctttgccacattttggacaaactacaccgatttctttaatgattggcttagtattacgacaatctgggaaacgagaacaagcatagaacttgccatagcgtcccatcttaatcaccattggtgcaccacaaatatcacaattaaagccagctggttcatccttgatttgtaccttttcgatttcactatcagccttatttaattctttcttaaacggttgatagtattcgtcaacaacatgaacccaatcctttttaccatcttcgacttcatccaattcattttcaagtcgggcggtgtaatcaacatcagtaatatctgggaagaagctttcaattaagccatcaacaatttcacctaattcagttggtacaattgaacgaccatcaagtttaacataatagcggcgttgaattgtatctattgtaggtgcataagttgaaggacggcccacgccattttcttccaatgcgtgaactaatgatgcttcagtatagcgtgctggtggtaacgtaaagtgctgtttgttatcggacttagtcatcttgaccttgtcaccctcttcaagatcaggtaagtcaacattcttttcttgttgattatcataaaccttggtgaaaccagcaaatttcaatttagaaccagtagttctaaaaatcacaccattttgaacaatatctgcacgaacagtatcataaacagctggggtcatttcactggccaaaaaacgtgaccaaatcaatttgtataaacgatattgttccgtagttaggacactctttaatgactccggtgtgcgatatacagatgttgggcgaatggcctcgtgagcatcttgtgcgtcttcttgattcttaaaatggcgttgactcttagctgcaaattctgcaccataattttcatccaaaaacttagaagcctcttgttgggcaactggtgatgttctcttagagtcagttctcatataagtaatcaaaccaactgttccttgcttacctaaagaaatcccttcatataattgctgagcaatactcatagttctacgagtacgataacctaaacgcttattggcttcttgctgcattgtagaagttgtaaatggggctgctggctgacgccgacgttgccgagcaacaactttatctactacaaagtcctttttcttatcgattttagccaaaacatccttaacagaatcgatattaggcaattctttctttttgccatcaacaccataaaaggcagatttaaaagtttctttacccttagcaaattccgcatcaattgaccaatattcttttggcttaaagttcttgatctccttttcacgatcaatcactaattttaaggcaactgattgtacacgtcctgcagataaaccttttttaactttggcccaaagaattggtgaaagtgaataccctacaattcgatcaagtacacgtcttgcctgttgggcatcaaccgtatccatatcaattgtccggggatgcttgaagctttctttaactgcatccttggtaacttcgttaaaagttactctattcttggctttttcgtcaagattcaatgcgtgcgctacgtgccaagcaattgcttcgccttcacgatcggggtcggatgctaaataaacatccttagccttcttggcttcgctttttaattctttaatggtatcgcctttaccacgaatggaaatatacttaggcttatagtcgtcttcaaagtcgattcccatttgtgacttaggcaaatcacgaatatgccccttggaagcaataacgtgatagtttcttcctaaatatttttcaatagtcttagcttttgcaggtgattccacaatgactaaggtctttttacgtttttttgttgttttacttttcgctttagtaggcattaactgcctccttaattcttattttattttatgggtacagtccaaaaataactaatactttctgaattgtcaaatctttatcttgttaaatttaaaatcaacaattggcgtagctcctgcttcaattaattgattgggacctgcagacaatgcattagtaattggtccaggtactgcataaatatcgcgattttcttgtaacgctaaattagcagtaatcagtgaacccgacttttctttagcctcagtaacgattatgctttgacttaagccggccaagatacggttgcgttcaggaaaacgatacggacgcggtggtgtatcaggcaaatattcactaatcaatagtcccttttgcacaatctcttcttgtaaagcaaaattttgcattggatatgaaaaatttaaaccattgccaataaccgcaattgtttttccttggttgaaaagtgcagccttatgagctaaggcatcaacgccttttgctaagccacttgctacaacctgaccagattgcacaatattaggtaccaagcgattaataacatcttgactatacttagtcggatagcgtgagccaacaattgtaatgatttctttttgcagtaaagaaatatctcctcgggtaaacaataccataggtggtcgataaatttgacgtagtttttctggatatgcttcatcgaaaaaactgattacgtcacactgctgttcaatttgttgtaccattcgatccaactgatcatcctgaaaagcgcgatagcatgcatccattagttcctcagttaattcaatttgttctaattcttcaaattcaatttctgtttcatcagttacctgattagcaattgtcagcaatttaacataaccaatccctttttgcaattttaattttagtagaaattctgtttttttcataaaaaaagccctccactatttattacgcaaaaagagaccattatttttttataaattgaaatttattcaaaaaaatcactgactggagcaaatgttttgcggtgaattggcgtagggccatactttttcaaggcttcaatgtgctccttggtgccgtatcctgcattatgatgaaagcaatattgagggtatattctatcataatcatccatcaattgatctcgaaagaccttggccacaattgaagctgccgcaattgaattcgacttagcatctcccttaatcaatttaacttggggtagatttactggcacattcattgcatctaccaaaagtgcattcggcttaacatcaagtgctcgtactgcttgagccatcgcttgacggtcagcttcataaatattaatttgatcgattacctctgcactttttactccaataccaacactaactgcttccgctaaaattttaggatataacttcaatcgtttctctgggctcaatttcttcgagtcgtttacatctaataaatcaaaatcttgatcaattatcacagcagcagttactaccggtccagctaaagggccacgtcctacctcatcaacacccgctactaattgtcccttttcccagaactttttttcataagaaaagcgacgcaaaaactcttctttttttgctagtaattttgcttgacgcttacgataactaactaacaatttttgtacgccggcccgcggatctgcctcaagttcgttaatttgggcttcagagacctcagatttcaacagctcttttatttctttaattgtcatggtctatctaacgtaatccttccgattgcacccttacgcaatttttgtaacataaataatgaaaaacgatcataatcatcacgcatgccatatttttcagtcattgacaaaagcaaatctggatcagccatatcagcaatttgctgttcaggtaatttagaaaatttaagcaaatccttagcataaaattcacgtaaatttttcaaaacaaataatgctacatcatctgcatgaaaaacactatccttaattgcaccgaaagcagctaatttataaccaacttcctgatcagaaaatttaggccataaaatccctggtgtatcgagcacttgaatattagcatttgttttcagccatctttgtcccttagttacacctggtttgttaccgacttcagccacgttccgaccaactaaacgattaatcaccgttgacttgccacagttaggaatacctgccaaagcaattctaatagtaggatttgaggcccctcgtgcttctagcttctctgttttggcagctgccgccttttttactaaggaaaccaacttctgcatattagtattgtgcaaggagtcaagtgccaaaacatacttattatctccagctaattctgctgcccatgcctttgttaaaactggatcagctaaatcagccttatttaagataataatatgtggtttattaccaactagtccttcaatcattggatttcttgaagcttgcggaattcgggcatcaagtacttccaccaaaacatcaatcagtcctaacttatcttccagttgattacgagccttgttcatatgccccggataccattgaattgttgccatattatctcttctttctaaaattaatcattttcatcatctaagaacaccacttctgacatcaaaatctgtctatataaagccagaaagcctcgacgatattttctctcttgttgtgcaattttacctaaatagtcacgttcttgtctaaaagcatatctatatacctcagctctaaattctttctgatcatcgggtaattctttttgtttaattgtatactttatttccctagcaaaatcaaccatagaagtttgattcatttgtgcccttaaatcgaattttaattgttttcgaatctttttaggtaaatagatctttttcatttgatccatagcatactcaatcattgccacacgaactcgatcaacttcctttctttgatcaaaatcaggtatatctttgtccaagatcatgtgaaaaacaattgttggaacaatcatacttagtaaaataagcgtaatttcactcaccaaaattaaatggaaatctgctacattaatacgtaaatcatataacgtatatgctaaagcaaaagtaactgctccatgaatgccacccagactaaaaatcaatgcttctttattactcgtttttcctttaatagaagggctaaatcgataataaaagtatctaataagcaaattagctaggtataaaattattccgatcaaaatcgcatcaattgtttgttgattaaaatgtcttccctcattgaccgaacaatgatgattcccaaaagcaaaaagacaatcccatttaaaatatcaatcagaagttgcgataattgattactgttataaaaaataaaggcattagtaagcctgcttcgctcagattcaacgttatgaatcaatccggctgcaacgactgcaataattccagaaacgtgaatttcttctgctaaaaaatatattattaacggtgtcaaaaagaatatgacatcaaccggcattgcaacaccagcagataaatgatatttggagcgaaaactttcctgacgcaagaaaactaataaagtagccaccaaagctcctagaaaaaacctccacctgcagaatataaaaaattacctattgcttgtccaatccgtaattcttgatgcaagtaccaatcaactgccatattaagcaaaatgatacctgaagcgtcattaaacaaagactcatcttttaggtaaaaagcaatcttcttaggcagcttcaatccatgtgttacagattctgttgctgtagcatctgttggcgttgaaattgcagccagaataaaagccagtggtagagagacccatactaaaatagatcccgaatcccgcagttatagttgccaagataatcataataaccgttaacccaactattgcgccccacgaacgtaaaacattatacaacctagtacgttgtccctcaaaaaatagtaatggcgctacaatcaagcccataaataattccgagctaaagtcctcaattaatgaattagtttgtggtactagtgcaatagccgctccaatcgccattgcaatgtaattaactgatattctcttcaaaaagcgttgttgaataatcgtcgcaaatgctaccgcaaagacaataaaaccaataaaaattactacctgcatttttctacccacttaataaaaaagcccaggcatctatcaggcttgggcttaatacatcattttgtcttcatacattcgataagcacgatcaaaaattgacatacttggtaaataactagcattcaattccaaataatctgacaatttctcataatcttgttcttgcttaggaaaagtcaggtcatgctgtgcattattcgcaaattgagctacgtcatcagctgaatctgcatccctttgcgtcattaaatatcgataaaaactttctcggtaagccataattactccacataatataagatcgcataagcaccattgccagcatgtgttgcgataattggacttgtctctgccactaaaacattaatcgcaggattgattgcacgaattttttcagctaattcttccattaattcaggtgtatcaacgtacgaaatgcctacttctttaatatgctctttattatctgcgatttcttttaacactcgttcatcaaaagcacgtgtaaatttcttacctcgtccttttttggctacgattaacttaccttgtggcatctgaagagcgattctaatattaagcatagtagcaattcgaccagaaagtgcacctaaacggccacccttgattaagttttgtaaattaactaccatcatttccagtttttgagtactacgaatctttttaacatgatcaataatctcagccatgcttttaccagcctgagcatccttagcagcagccaaaacttggaagccttctgccctgtcggttagttcagagtcaataattgtaacattatcgctttgacctgcaatttctgcagcttgacgagcggcatctatcgtaccacttaatgatttagctaagaaaataccaatcacttgactgccatctgcggttaattttttaatcacatcaacaaaacggccaattggtggctgactagtcttaggtaagctctccgcttcattcatcttcttgacaaaatcacttctagtgatatcaatcccatccacatatgacttaccgtcgatggtaatcgtcaatgggactactgtaatgtcatatttttcaacttcttctggtgttaattggacggaagagtccgtcataacttttatcttcgacaacgtattcgccttcaattctaatttgtttacccgatttatgataaaatgtaagcaacatatatactgtattgtatcaaaaaactattagaagaaaaaaggattgattacacttcatgaaaattagcaaactttggcagcaaccagaacaacgatcagaaaggtactaccttctagataatatttttagtgccataactcatgggattggtttcggactagcagttaccggcttagtaattttaattgtaaaggcagctcatacaggcagcccgatgcgagttgttactttcacaatttatggctcttgcctggtactgctttatttattttccacactatatcacagtttagtttttacacgggccaaaaatatttttcaaatttttgaccattcctcaatctttcttttgattgcaggatcttatactccatattcacttgttgcaattggtggagcctggggttggactttatttggcttgatctggggcctaaccatctttggcatcatttactacatcttcaatcgtggtaaacacgtcatacttgatacaatcctctatgttgcaatgggatggttagttatcttgtcaggatcttatttatatgttcgcttaagtccaactggattctggctattagttagtggtggcattgcttacacaatcggcgcgattctgttcagtatgcgcaatgttccctttatccatactatctggcatttatttgttatgctcggttcaatcttaatgtacttttccgttttactttatgtttaaaaaatgtagcagttgaattctgctacatttttctttctattcaattgtagtcaaatagctttcaatcgcttcttgattattctcaacttcacctgaaacaactaactctcgaattttattcaaagtctgccccaattttgcacctggtcgcatcccgcgatctattaaaaatctcccatcaacggctagttccgacgcttttttaataggtaaagccatataacgatcaactaaagcttctgaagaaattggttgaccaacaatatgagcaacgtcaatcgtattaattaatgtctcttcccctgctaagaataattcataatcactaggagcatgactagaaagtaaatcaaatagattaataattctttcgacttgctcagtcatagcattagagtttttccagtcacgcataaaacgatgaatttgttcattcggtaatttcaatagcaaaattatcagtgaccacaaactattttccatcgttggactgaattttaactgtgggaaaatagctagttgatctttttttccgccaaaatcaggtacatcttcactcaaatttgtatcaagaaaaacctgaaaagcttgccgagcatgtggtcctaaacctaattttacaaattcttctcgaattcgttcaactgaaatttttttaagtaatttatgattatccttaattgcctgttgggtcttgctttctaacttaaattcaagttgactcataaaacgtacggcccgcatcattcgcaaagcatcctcgtgaaatcttttttctggatcacctacagcacgaatgacatggtttttgagatcatctagtccgttaaataagtcaacaatttgccctcgtgtatccattgccagagcgttaatcgtaaagtctctacgctttaaatcttcatctaagttttgaacaaatgttacatgatctggacgacgaaaatcttgataacccgattctgttctaaaagtggtaatctcataactttcaccaccataaaggacagtcaccgttccatgtttaattcctgtatcaattgacttatcaaataactcttttacctcttctggataagcactagtagtaatgtctacatcatgaacatgacgatgtaacaaaacatcgcggacagaaccacccacaaagtacgcttcaaagcctgcattttctaatatctgtaacacgggcattgccttggtaaaaatttctggtaaattatctatctttatcatattaaaatctcaattcttattgtctttattattacttttgctatacactttgttaaaattgaggaaagacataaaggaggtaatcattatgcgtaagattgacaaaagtatcttaattgatatcctcatgatcgcgctaggctgtgctatttacgctttaagtctagacatgatttctgtccccaataaactagccgacggcggactaagtggtatttcacttcttctgcggcatttttggggcatcaacatgggactatcgacccttgtattgaatattccactaattttgttaggctatcgctttatgggcaaacgtcttttagcctatacaatctggggaacgctcagtctttcctttttcttatggttttggcattcagtacctattataaaacaattagatttagaacacgacctcttcctttcagcaatttctgctgggttattgtctggaatcggattagggttagtatttagatataatggtacttccggtggaactgatattattgcccgaatctgtcagataaaatttggtatttcgtctggcaaaatgcttttagcttgtgatgcaatagtactcttcgcatccctatcttacctagacatcaagcatatgctatacacattattagcttcttttgtcttatcccgagtaatggataccgttcagcaaggtgcatacacagcccgtggtttattaattatctctgacaaatatgaacaaattggcaagatgattgatttaaaactaaatcgtggtttcacatatctaaaagctttaggtggctatcaacaaaatgaaaaacgtgtaatttatgttgtagtcgcaccgcgggaaattccatcaatcaaagctttaatcaagcaagaagatccacatgcttttgtttcaataattgagataaatgaggcaatgggagaaggatttacttataaaaaaccacatcgctttttcatccacaagtaaaaagctataccatgatgcatttcatgatatagcttttcttttactaataattaataattacagtcaatacgttattagctttaacgtattcgttttctccaatttgaatgaatggccgttcatcaatttctttatggccaagatttttaactttagagccttgtttaacaaacttacctggaattggctgaccatttttatcataaacatatgatggatgcttaatgcggttaattgtctcggctgtgtccttaatgtatggtaaaaatgccccttccttaacgaatttattcttaccaatcttcacaaaattattgccattaattgatttaatgcctaggatcttgtaaacacggcccttttttaaatgtccaactttttctcctttacggttaaaaatcgttgcttttctagtcaagtttaactttttaccctgacgaattggattagttgtagctgcgttaactgtctgagcagtcatcgcacctaaacttaaggaggctaagactactcctgccatatacataatttttttgttcatcatgatctcatcccctaatcattacttaatcttcttacctatattttaacaaaaaatgcagaggttatacacttttctctatttttatttatgggatggataacacttattctttgcaatctttcatggcaagaactaatcttagcttgtaagcgtttgtcaatatcaagcaatcaagaggatgaaaacaatgccaaaaaacagttactcccaagaagctttcgttcatgtctatttacttcttgggaattaatggggtaattgggtccggtgcctttttaatacctcaaacaatctataaagatatgaacttgatgagtgttttcataacaatttgtgctgctcttacagtaagtatggttactctttgttatgctgacttgtcaagtcgttttactggatcaggcgcagcttggctttattcatatcacgcctttgggcgatttactggctacgaacttggaatatatacttggtttttaggatgctgtacatatgcggcagaaatagtagctttgttaactattttaaagactttgtcccctgtttttagtaatcacgctgttcactacgggatagctattggaataattgtgctaattgtgctgtttacgattattaacttatttggtcggacaattgtaaaattagtcgataacttatcctctgctgccaaaatgattactattctgatttttatcatcattggtgccttttttattcataaaatgaactttacacctgtgattcctaaagcagcaaccctaggtgttggtccttacttcaaacattttggtgctgcatttagtgtagtattttacatgtttactggattctcctttattccgattgccccaaaacagatgaataatccagagaaaaatattcccaaagtattgatctcagtgatgatcactgtgactattttatatgcattaatgatgttagtagctatcgggattttaggatccaagatggttaattacagtacgcctattgctgtagcctttcaaaaggccgttggtgattggggctacgttctagtgattgcagggatgctgattagtgttatcggcgttgcttttgcaggatctttcaatactccatcgttgattgcttctcttgctaatgagcacgcaatgttacctaaatggattggaaaaaagaacaagcatgatgctgcttgggtagctattttactcagtgcaatcatcactatgattttaatcacacaatcatacctcttcttggtatcttgcattgtattggcttcatttattcaatatgtaccatctatcttagcagtaatcaaattcaagcatactaatgaatttccaaataacggttttaagctcccattcggctatgttattccagctttggcattaattatttcatgctacatggtaaccaatttcacttggaaaactattttggtcggaatagtcgtaggggtattagccgcagtagcttacttcttcattgaaaaagatgaagaaaagcatcaaaagtatttgtcaaaaatgcgtaataaataattttcaagttataaggacgatgactagaaactgtcaaatcttttgtgtaaatagttctttctcgtaaattgattttttaattatttatttaatcaaagtaggattctaaggtgtcctgaacctgaccaaagcctttatgaattcgattgaaataacggtcattgtagctcattgcctgaataccaataaaagcatcaagcgactgttcagttggaaactctgccttaggcttagctttacgcttgatgacgttgttaaaggattcaatcatattggttgaataaattgaagctctgatttgtttgggataattgtagaagaccagcagatcgggctcaatttccttcaaacctttgatgacattgctataagctttattccatctggcatagaatttgtgcaagacagctgcagcttctttttggcttgtctgttgatgtatctgcttgaattcgttcatgatcttttcgcggtcatccacccggactttagcacagatattgcgcatgacatgaaccaggcagcattgaaaatgagctttaggataagtcctggccaaggctgttttcatgccaacaacaccatcagaaagaaagagttcaacttgcttcaagcctctggactccatgttttgaagcatctctgtccagacttcaatgttctcactaggagcaatgcagtagtcaatgacttccttatgtccattaggtttaatgccaatggcaatatatactgcttcacgctcaaacgtttctcggcgcaaaggaaggtatgtcgcatccaaatagacgcagaaaaacttgtcgcttagcttgcgtttgtggtaagcctcaacctttggaatcatctgcttggaaatatttgatacctgagctggactgtaatggctgccatacatcttttcaattagatcggctatttccctggtggtcacgcccttggagtaaagcttgataatcatgctttccaagatatccgagtgctgcttgtagtcaggcagcgtgtgctgatgaaattgaccgttgcgatcccgaggcacttgcacttcaattgggccaaattgcgtatcaactttgcggaaataagcaccatttctagagttgccagtattccagccatttctggcatagggatcatagcccagaaaggcagtcaattcagcttctaacaagttattaacagcctgttgtagctctttgcgcaataaatcatttattttgtctggattgaatagagcttgagcaaaatctttggtaaaatcattcatgaaggagttcttctttctgtatgtgtttttttgttcaaaccaatcatacgagaaaggaactcctttttctaatgtttaaagaaataaatttaaggaatcattcatccttacacaaactattttacagtctcgatgactatccaatatcgcccttattttttgatcaattaagactttttagtctgcttttaaatctatttttcaacttatacattatgaaagcccatctcctcttaataatatttagtgctaaactgttagatagattagtattagaaaagagcaacaacaaatgagtaatcagaaagctaaaataaataataccgaaattaaaactagagtatctcacttcagaccaagccagtaaaaaaattcaagttaacataaaaggaaaaccatatgtctgaagagataattaacacagtcacaacaaaaaatgattttaagagtgcattaagaaatgcgggtattaaagatgatgataccgtattagttcatactgcactaagtaaattctattacgttcctaatggtccagaaaccattgtcgaagccttaaaagaagctgtgcctaatggaacaataatgatgccctcacaagtttctacgaattgtgatccagccacttgggaatatccaccagtacaaaaatctttgattcaagtagttaaggatgctatgccaccttataatcctacaacatcaatgacagaaggcttaggggttacgccagagtatttcagaactttgccagatgttgttcgaagtacccatccttacttgccaattgctatttggggcaaaaacaaagtaaagattgcacagaatcaacctttaaatattccttatggaattgacagtcctttagattatttgtaccagaataatggcaaaactatctttttaggcactgattatgaaacgtgtacagttttgcactatgcagaatccacaattggtagaaaaaccgaaacatgttctgctgcaactagtctggatgaaagcggcaaaactatttggactgaatatcaaaatattgatatggattcatatgatgactttaatgaattagggacagagtttgaagcaaagcatccctctgctatcaaaaaggttaagttaaacaatggtgtcatcaaagcaataaatgtaaaaccgctaattgattttgctagaaaatggtttataaaaaaagacaataatcattcaatttaataataaaaggaagaagtcactttcaacttcttcctttttctttatttaatctttgttaaaacctttgcacctatatttaaacctacactatgcgatttaccgccccaatcacgttcatcataattatccatatcagctaaagtatctgcagtgaaaagaaattgtgcaaaatcaatctttctaaactgagcacatgctgctaaagctgcacattccatttctacagttgacgcgcctaactgacgaaattgtgccacttttttaggcgtttctctaaagaaaccatctgttgtccaagtcgttatctcgtcatattctatatttagctcaactaaaatcttttctacttccttcaaaaatatagaatctagttccacaagttgtccaggattcatatagtgaaaagatgtcccttcatctcgaattgcacgtgttggaagtagcatcgcattttcaggtaaatctactaaggcacctgctgttccaatggttaacaccttttctactccataagcaattagccattcaagcaactgtacagctgccggtgctcccaagggcgcttgacacaaagtgaaaaattcgttattaatttgaacttcataaattttaggattaaaagaacatgactcaaattcacctaaagtacggtgaaaatggtgatctaaaaatgcattaatttctttttccggcacgaatgcgtaaagcaatcttggatgaaaatgaaatggttcttgatcgtgatttggttcaagaaccgcatgaggatgtttgtcaaagtctaaaatgaatggttgtttgttcatattttacactccatttttagttgaaatattatcataaactcgctaatacctgagatccaatattcaagctaacgctatatgaatcatggccccagttacgtttatcatagttatccatatcagctaaactatcggcagtaaacaaaatttgtgcaaaacttatatttctaaattctgcacaagcagctaaagctgagcactccatttctacagtttttgcacctagttttttagcttgcaaaacttgattaggtgtttctctaaaaaatccatctgttgtccaagttgttccctcttcatattggaaacctaaattttttatttcattctcaactcttcttacaaaatttttatctaatgcaataatcttacttggttctttgtagtaaaaagatgtcccctctccgcgaatcgcttcttgagggacaaacatcgtgttttcaggtagattatccaaagctcctgcgtttccaacagataaaacttgtttaactccataattgatcaaccagtctaaaaactttgttgaagctggtgctcccactggagcttgacataacgtaattagttgattattgacttccacttcatatattttaggtctaaacgaaacagttttaaatttgcccagagtcttatgagagtgtttatctaaaaacgagttaatttcatcatctgggacaaatgcaaaaagcaatttttcatgaaacttatactctaaattttcgactccaggttctattacagcttttttacttaaatcaatatctaaaacaaatgatccttcattcatatacgcgtggtgctagttaaatcgttctagacaataagccaaattataagctaaaattgcaatttccaaccggctttgaaagcctatcagactacgtgctcgattgttctcggcattgtaataggtcagaagcgaaaagtcgctttcaattgttctgcgaatagccatcaattgatgatcattgtgctttttagctcctgtcatatttttacgatatggtgtccaaagttcgtaacccatttgttttagctgttgatgcagttctttgcctaaatagccttcgtcgccaagaagatagtaattagatggatgggtattttctatcagttcaactgtctccctggcatcatgaactgatgcctttgttacgacataatcaagaatgtaaccgtcatcgctaacaatggcatgaactttgaaaccatagaagtaaattttcttggtggccttataaccaatgttggcataaccgcgaaaaattttagcacgatagtttcgaattggttggcaaacaggtaccggaaagctgtcaatgatcaagaactgtccattcaggtcaacctttttattcatttcttgccgtatctgataaatcaattgcaatagctgacgtgaacgccgattaaaacgtgagtgtgataaacaattgaaacattcacagaatcttctttgtgattcaattcctgtcttagcttgccagataagtaaagccaaaatcagactgtccgtagttttaatttgatcaatatttcgccgatgagtaaactcagccggtgcatacaaacgataccagtgccgacaaattatcactaaatctttaaaactaacttgtaaatggtggctaaaacgcttaagcttaaggcagttcaatcagatcagactcttttctattattactatttacaagtcgagtctaacaagattggacttttttattaactaaaacgatttaactagcaccacgcgtaaattaatatatattctcccttaatcaataaatggatagtcttcattaaagtaatgatcaataaaaatttgatgttgcttgttaaaaatcttggataatttatctttagaaaaatacttcagatcaagagtttcagagctaatctcttttgacattttttctactaattcaacagttactgcctgtgccacatcttgattaggataatgctggataaaattagttgaaacgcctaatagtgacttagttcttacttttaagccagtttcttctaaaaattctcgaacgcatgcttttggagctgattctccaaattctaaagcaccaccaggtaagccccatgcattaaaatctgatcttttttgaagtaagatttcattcttgctattagccaaaattccaccagcaaaatttagaataattggttcatgaccaactttttggcgtaaggtcttaatatagtttttaaccatcgctagtcctctacttgaatatcattcatcacaatttcaacttcatcgtctaaattaatctgactagtaaaagcatactcgggaataaaaccaagataatctttttcattccaccatgagcgcattgtttcttcaccaaaagaatgttcatgacgagttttatggcgtttcattgtttcttcaaacggaatatcaaaataataggcataaatttgatcaccaaaaagctgctgagattttttgaataaatcagcataccatttcgcattcaagataccttctaaaatagtgtaagaacagtgatgataaccatactcaagcaagttttctaataatggcaaagcaaatgtcttttctccgtctttaacattcagcatttctcttctaactgtatcttgtggaatcaatagtgtattgtgtggcaatcgacgatggatttctttagacagtgtagttttgccactgccagagtttcctcgaattataattaattttgatgtcatcatagaaatcttcactttcttaaaattaattcactgcatctctaattgttgcaaacttatcaaatgtataatctattataatctataccatgaattttaacaataggcagcattttccctttttgtcccatcaataatcctgcagaagcggctagcatgtcacagatagtttcaacattagttttatcttgatactgactttttcttaaaccagaaacaccatacaatccaattgctacttgagttgcaccttttttatcaattcttccatcactatcggtaattatgatagctactctgacttttaattgatcaaaaatatcatcactaattctcttagcaatttcatcacaatttttaggtaaaactattgcagtaccagcatcaattttatctacacctgcactagttaaaaacaaaccattcggcaaccacccaccaataaagttcttagatatctttagtttcttaccactcttatcttcggtttgatcaattataatctgaattagtcttggagcttttctaggtatttgctgatgcaaacgtaaggctaattgacttggattaatagaatttaagtgaacaaacagaccttcagatttagaaatcaatttagaagcaatacataaaacatcattatcgcgtatattaaatccttcatttttgattgtcctaattatttctgcacttaagttgcactttctctctattttcggaaaattatgcagcgcttcaattgtaatcatgactataacctcaaatcagatgttaatttgcccaaaacagtaatttcgtttctatcgcaatacttcaatgtttttatgatcggttaccatgatttatctggtatctttctcctttattaatggtattgttagcaaaacaacaccaaaatacactgcggatacaaaaaaacattacttttaagtctccaaatactttcataatactattgcttataaataatgaaatactaaccaagatctctgcaataaatgaaacagttgaaagcatagtcgacttattgctttctccataaatggcttcattactagtagctgaaatttgtcccgacatcattcccatcaatagttcaattaatagaaaaaggcaaagcagtaaatatttattttttagagtaccacttaatataaatgctccaatcatacttccagtattcaacaaagtaatcccttttgaattaaaggaagtagaaattttactaaataaaatcgaacctagaattaatgcacacataaataatgtataaactgaaactgtcaaatcttttgtgtaaatagttctttctcgtaaattgattttttaattatttatttaatcaaagtaggattctaaggtgtcctgaacctgaccaaagcctttatgaattcgattgaaataacggtcattgtagctcattgcctgaataccaataaaagcatcaagcgactgttcagttggaaactctgccttaggcttagctttgcgcttgatcacattgttaaatgattcaatcatgttagtcgaataaattgaagctctgatctgcttgggatagttataaaagaccagcagatctggttctatgtctttcaagcttctgataacatggctgtaaaccttgccccatttggtatagaagtcatgcaggacagctgtggcttcttctttgtttgtctgttgatgcacctgtttgaattcgttcatgatcttttcacgatcgtcgacgcgtactttagcgcagatattgcgcatgacatgaaccaaacagcgttgaaaatgagctttaggataagtcctggccaaggctgttttcatgccaacaacaccatcagaaagaaagagttcaacttgcttcaagcctctggacttcatgttttgaagcatctctgtccagacttcaatgttctcactaggagcaatgcagtagtcaatgacttccttatgtccattaggtttaatgccaatggcaatatagactgcttcacgctcaaatgtttctcggcgcaaaggaaggtatgtcgcatccaaatagacgcagaaaaacttgtcgcttagcttgcgtttgtggtaagcctcaacctttggaatcatctgcttggaaatatttgatacctgagctggactgtaatggctgccatacatcttttcaattagatcggctatttccctggtggtcacgcccttggagtaaagcttgataatcatgctttccaagatatccgagtgctgcttgtagtcaggcagcgtgtgctgatgaaattgaccgttgcgatcccgaggcacttgcacttcaattgggccaaattgcgtatcaactttgcggaaataagcaccatttctagagttgccagtattccagccatttctggcatagggatcatagcctagaaaggcagtcaattcagcttctagcaagttattaacagcctgttgtagctctttgcgcaataaatcatttattttgtctggattgaatagagcttgagcaaaatctttggtaaaatcattcatgaaggagttcttctttctgtatgtgttttttttgttcaaaccaatcatacgagaaaggaactcctttttctaatgtttaaagaaataaatttaaggaatcattcatccttacacaaactattttacagtctctataaactagtgaaagattaaagcctaatttttcaacataaataatcgaccagtagataaggataaactgcgttccacaatcataacccacattcagcaacaacaaaatccagaaatttctttttctaaaaaagccaacaatatttttaatattatatttatctttctttttactagaagccctattatctgaaaagataagaaacttgtcataagccaaataaaggctggatataacacaagtccaagcattgcgaaccatattagtgcagtatctttaattccaaatagccaagtcccaatatttccaccgattaatgtggttaaattcaaaataattatttgcatccccattagtttgctactaggggcaattttattttgttcctgtaagtcagttacataggcaagtaaagtacctgaattaagagctaagccaataccatataaaagctctgccgctgaaaagaaaaagaagtttctaaatagaattagaatgaaaaaactcgtggcaataactaaagatgataaagctaaaactttcaatcttccaattctatcagctaaatatcctgctggaagaagaccaaatacaataccgatattttgaaaagattttattgaaccaatatttgcatccgggattccatttttagcataaaataatgaaaaaattcctgacattgatgatcggaaaagtgtaaaaactgctgtaaaaactaaaaataaaattgcaattttaaaacttacactttttagcctcatgatcatcaactcctattattttttaagagactgtaaaatagtttgtgtaaggatgaatgattccttaaatttatttctttaaacattagaaaaaggagttcctttctcgtatgattggtttgaacaaaaaaacacatacagaaagaagaactccttcatgaatgattttaccaaagattttgctcaagctctattcaatccagacaaaataaatgatttattgcgcaaagagctacaacaggctgttaataaattgctagaagctgaattgactgcctttctgggctatgatccctatgccagaaatggctggaatactggcaactctagaaatggtgcttatttccgcaaagttgatacgcaatttggcccaattgaagtgcaagtgcctcgggatcgcaacggtcagtttcatcagcacacgctgcctggctacaagcagcactcggatatcttggaaagcatgattatcaagctttactccaagggcgtgaccaccagggaaatagccgatctaattgaaaagatgtatggcagccattacagtccagctcaggtatcaaatatttccaagcagatgattccaaaggttgaggcttaccacaaacgcaagctaagcgacaagtttttctgcgtctatttggatgcgacataccttcctttgcgccgagaaacatttgagcgtgaagcagtctatattgccattggcatcaagcctaatgggcacaaggaggtcattgactactgcattgcacctagcgagaacattgaagtctggacagatatgcttcaaaacatgaaatcccgaggcttaaagcaagttgagctttttctttctgatggtgttgttggcatgaaaacagccttggccaggacttatcctaaagctcattttcaacgctgtttggttcatgtcatgcgcaatatctgcgctaaagtacgcgtcgacgatcgtgaaaagatcatgaacgaattcaaacaggtgcatcaacagacaaacaaagaagaagccacagctgtcctgcatgacttctataccaaatggggcaaggtttacagccatgttatcagaagcttgaaagacatagaaccagatctgctggtcttttataactatcccaagcagatcagagcttcaatttattcgactaacatgattgaatcatttaacaatgtgatcaagcgcaaagctaagcctaaggcagagtttccaactgaacagtcgcttgatgcttttattggcattcaggcaatgagctacaatgaccgttatttcaatcgaattcataaaggctttggtcaggttcaggacaccttagaatcctactttgattaaataaataattaaaaaatcaatttacgagaaagatctatttacacaaaagatttgacagtttcttttttaagatctataacctctttaactatttctgcaatttgttttggatattcaaaatgtatatagtgagattcgcctaatgttataactttagatttaggattatttgaagtgtattctgaccgcttatattcattttcacgatacttttctgtaataacaatacttggtgttttatcacttatcctggtagtatttttccaaaacgaatcattttcgtaggctgcttgtgcgtttaaattatccttttcatcaaatttcttcgcattttgctctgtagttgtccaaaactttttattttcttctggagtaaaaatttctctaagatcagcttcaattttttcttgaagttttgccatgtttttatttttctcaatataagctggttcctttggaggatttaacatgatttctctagtagttggctcaattcctacaaaagccttcaaattattgattttatctttcatttgcatagcatacacaccgccaatgctatgagccaaaattataactttttttgcattaaaatcgttaataattttagctaatttagtagcttcgtctgatactgtatagtcctttaaagacttgccactaaagccactattcaaataatctgatgcaaaatagccatacttattgggcaaagcttcaattacttttgaaaaagattgtgctgtatcaaaactaccaaagccattcaaaaaaacaactaatggatctccctttcgataggcaaaattaatcttgcctaattcagtttcaatatcgcttctttgcataaatttctccctttattaaaactttgaagtcgttatattttaattatttcttagcacaaataccttatgcccattttcatcatcttttaaatacacgaatcagcttctagcaatttattaacagcctgttgtagctctttgcgcaataaatcatttattttgtctggattgaatagagcttgagcaaaatctttggtaaaatcattcatgaaggagttcttctttctgtatgtgtttttttgttcaaaccaatcatacgagaaaggaactcctttttctaatgtttaaagaaataaatttaaggaatcattcatccttacacaaactattttacagtctcgcctgcggcatcatatcttgaatctgcttcttggcccgctttaatatttttcccggccatttttaccaaattgcccacctgcatatggctaatattaaagccagacaggcaattgactgctagagcagtattgcgataagtggcaacgctgcttacttctaagatgtttttgactgctaaaatactgtagcgcttgtatttgtcaaagcccattaattcatccaagggataccttgcttgtttgcctgggcagacatatcttcttctgacatacctaacttcgccaaaagccatattgattgagcgctcattcttcttatcaatctgatagccctgtgctttaaccttggtaatcatttcatcatcaactttagctaaagccaaggccatgatttccttaatcaggtttaagaagaaacagattatttttctttcacgcttaatataattatcttcagactttataatatttgcgatttcagttacaattgaattcataaaagaccagcttctaatgtgttttttgttcttaacatcagactactggtctttttgtttgagctcaagtccaaattcaaaggacttgggcttttttaattatttattcaacttaccgtaaaaaattatacacttagtgacgaaatttttgctattcaaagtgctcaaaaagagacgcgtaatcgttatctaaaaaaacaaaaagctatgttggcagaacatgatcttttacccgaaaaaaagcgcaaaccacgtgcccgcatgttatcagagctgaatttaaacaacgatgatgctattttaacttttgccaataaagttaaggttttcaccagtggacccgagttgtttgaccaaataattgctgatcttaagcaagctaaaacatcgattagtttagagttctacactttttataatgataatctaggaaagcgtgtcttacgggccttagaagaggcttctgctaaaggagtaaaagtcagagttatttatgatgtctctggctcacgtggtactaaacctgctttttttaatcatttaagagagcttggtggcgaagcacagcctttcatttctacttctaaaaagcattggtttactacaccacgactaaattatcatttacaccgcaaattaatcgtaatcgaccatcatattggctatattggtggctttaacatcggtgatcagtacgttaatcaatctaaaaaatttggtcattggcgcgatacacatttacgtgttgtgggtcaatcacctatcctaatggagacacgctttgccatggattggaatacttctatcagacgaactgcattacctaaatttgatctaagcgaattacatgcttttactgtcgaacgtaaagatcttgacaacgatgataacgtagcaatgcaaatcgtttcttcaggtcccgataaccaacattatggcattcgccgaggatatgagggcatcattgctggggctaaaaactatatctatattcaaacaccctatttaattcctgaagaatccattttagaagcattaattattgctgctaatagcggtgttgatgtacgcatcatgatcccttgcatgccagatcatccctttgtttaccgagctaccgaatattatgcaaaatatttagttgctcatggcgttaaaatttacaaatataatgatggcttcatccatgccaaaacaatggtttctggctccaatatctcatctgttggttcagccaatcaagacttcagaagttataccttaaacttcgaggttaacgcttttaattacaatattcaattaactcaagaacttaaacaaatttttgaaaaggacctagctagttgcagtcttctaactaatgaatactttaatcagcaatctaaatggcttaagtttaaacaatacttttcacgtctgttggcacctattttttagaaataataaaaccacgaagcaaaaacttcgtggtatttttttacagattattataaagatcctgcatttcatcatcttctggagctaacttaagatatctttctagcagttgttttgttatttcatcattattttgtacattgaaaaagattatcatttggcgcaaaaagtctggattatccttgaaatccggataagctagtaaaaattcgctctgtgctttctgaatatcatccaaatcctcatatgataatgccatattccaatgtgcctgtggctccacgctttcctcatctaagttactaaataaggcaatattctccttagcctggtgttcatgaacatataggttagatagctgcatacgtaaatcactattgtctggcgctacttttaaccccttttcaagtaagtcacgagctgtatccaattcattcaaattagctgctgcacgtgctcccattgaataaagtgtttcatccagttcattgtacgctaatcctgcttgagcagtcctcaatacttgttcattgtcatgctgatgatcataagcttgtgctaataatggatacgcatttacatagtcaggactttgctcaatcacttcatctaagaacttaattgcctgcttatcatcacctacagataagagaactaatcctgcttcatacttagaatcaatatctaaaatactatttgcatgttcacgaataactttggcagcttcttcataattacctaatttggcaaaagtcgcaaataatctttggtacagatttacttcactaaaagtactttgacgtttgattaaatcttgatataactcaagtgcttgttcctaattaccacttaaatagagactgtaaaatagtttgtgtaaggatgaatgattccttaaatttatttctttaaacattagaaaaaggagttcctttctcgtatgattggtttgaacaaaaaaacacatacagaaagaagaactccttcatgaatgattttaccaaagattttgctcaagctctattcaatccagacaaaataaatgatttattgcgcaaagagctacaacaggctgttaataacttgctagaagctgagttgactgcctttctaggctatgatccctatgccagaaatggctggaatactggcaattctagaaatggtgcttatttccgcaaggttgatacccagtttggaccaattgaagtgcaagtgcctcgagaccgcaacggtcagtttcatcagcacacgctgcctgactacaagcagcactctgatgttttggaaagcacgattatcaagctatactccaaaggcgtaactaccagagaaatcgctgacttgattgagaaaatgtatggcagtcattatagtccagctcaagtatcaaatatttccaagcagatgctccccaagattgaggcttatcacaagcgcaagctaagcgacaagtttttctgtgtctatttggatgcgacataccttcctttgcgccgagaaacgtttgagcgtgaagcagtctatattgccattggcattaaacctaatggacataaggaagtcattgactactgcattgctcctagtgagaacattgaagtttggacagagatgcttcaaaacatgaagtccagaggcttgaagcaagttgagctttttctttctgatggtgttgttggcatgaaaacagccttggccaggacttatcctaaagctcattttcaacgctgcctggttcatgtcatgcgcaatatctgcgctaaagtacgcgtcgacgatcgtgaaaagatcatgaacgaattcaagcagatacatcaacagacaagcaaaaaagaagctgcagctgtcttgcacaaattctatgccaaatggaataaagcttatagccatgtcatcaaaggtttgaaggaaattgagcccgatctgctagtcttctacaattatcccaaacaaatcagagcttcaatttattcaaccaatatgattgaatcctttaacaacgtcatcaagcgtaaagctaagcctaaggcagaatttccaactgaacagtcgcttgatgcatttattggcatccaggcaatgagctacaatgaccgttatttcaatcgaattcataaaggctttggtcaggttcaggacaccttagaatcctactttgattaaataaataattaaaaaatcaatttacgagaaagatctatttacacaaaagatttgacagtttccttaaatattcaatctctgctaaaccaaatttaatagcatcttcttctggagctaattgtagtgctcgtattaatttgtccttagctgtttctattaagccgttagtttggtaataatcagcttgtactaatagactatccaaataagctgaagagctctcagggacattatataaaagcgacagaccatcgtcatcatcgccatcatttaacataatctctgccaagtaaactttaaataaatcttctttaggaaatttagctattaaagctcgatatatttcttttgctaaatctgtaaaacctaagccagttaggttttctgctaaagatgacaagacctcgggagcatcattatctaaagcttcttttaaaaggtgtttgttttgtgaaaaatcatgattttgaattgcatctagtaattgttcagaataactcataatacctccaatcaagttaccattgtactaaaaaaagacgccggaacaaagtccaacgtcctatcacattagttaagctattacttaacggcatccttaagagctttacctggcttaaatgcaggtacttcactagctgggatttcgatttcatcaccagtttgtgggttacggcccttacgagcagcacggtgacgtacttcaaaagtaccaaaaccgattaattgtaccttttcacccttagcaaggttttcttgaattgaatcaaggatagcatcaacagtatttgcaacttgcttcttagttaacttagtttttgaagcaacttctgaaactaattcagccttatttgccatgaataattcacctcctgaatttgaacctaatgttcaaaaaatttttctttgtttaagctaaacaaggaaaaatgatcacaactaatcatgttccctaaaaacaaaaatatcacaaaaaccttataacaacaaggttttttatgatattttgcttatcttttatttacgtttacgtggtaaaatcttgattggtgtacccgtaaaatcaaagttttgtcgtaattgattaatcaaaaatcgttcatatgagaagtgcatcaattctggatcattcacaaatacaacaaaagtcggtggattcgtacttacttgggtcatgtaataaacacgcaatctcttacccttcaccattggagttggaactaacttacttgcttcaagcaacaaatcatttaagacactagattgaattctttgattttgattatcatagacttctttaaccatattaggaatttgatctaatctttgacctgtcttggcagaaacaaaaagaataggagcatagtccaaatattgaaattcatctctaatttcacgttcaaattctttagcgcttgtactattctttttcggcaaatcccatttgttaacgacaatgatgattccacgacccgcctcgtgagcatatccagccacatgcttgtcttgttctctaatgcctgtacttgcatcgaggacaagtaaaaccacgtctgaacgctcaatagcactcatagcgcgcattacagagtacttttctgtcttctcatacactttgcctcgtcttctgattccggcagtatcaacgaccttaaattttacaccatcatgagtaaacggcgtatcgacagcatcacgagttgttccttcttcattagcaacaattacccgatcttcaccaagtaatttgttaacaattgaagacttacctacatttggtcgaccaatcacgctaaaagaaataacatcatcagcttcagtatctttatcgtcaggaaaatcattaacaatctgatcaagcaaatcaccaataccagtaccatgactacttgaaacaggaatcggatcccccaatcctaaactatagaaatcataaatatcgcttcgctgttcaggattatcagctttatttacagctaaaataactggctttttagtacggtaaagaagatgagctattctttcgtctaaatctgtcacgtgatttaccacattggttaacatcacgataacatctgcttcttcaattgcaatttctgcctgagctctgatttcttcctcgatcttgccaccttcccaggtaataccaccagtatcgatcaaatcaaacttatgccccatccattcggcttgagcataattacgatctcgggtaacaccaggtttgtcctcaacaatagctaaacgttgattaattattctattgaaaagtgttgatttaccaacattgggttgaccaacaattgcaacaactggtaaaaccatttctcgccctcctttactaatctaaacataaataaaaaagccgactcaagtcggcttttttataaaatgactacttacggtcctttaattggtcaccaatgatgtcacctaatgcaaagccgttgtcgttatcactcatgtacttcttgtttactgaattttcgttacgtgaacgacgtggacgagaattatgattttctgaagaagcatttgagtcagcagccttgattgaaagtgagattcttctatcacttgggtcaatgttcaaaaccttaaccttaacactttgaccaacctttaaaacatcgcttggcttgtcaacatgcttgtttgagatttctgaaacgtgtaccaaaccttgaataccatcagcgacttcaacgaaagcaccaaagttagttaatgactttacttcgccttcaaaaatatcgccttcgtttaagtcagctgtagcttgttcaaatggagaaggttcagtttgcttaatagacagggaaatacgatgtctgtcattgtcgataccaatgaccttaaccttaacatcttgaccaacctttaaaacatcgcttggcttgtcaacatgcttgtaagaaatttctgaaatatgaactaaaccgtcaacaccaccaacatcgatgaatgcaccgaagttagtcaaacgtgaaaccttaccttcaacaacgtcaccaacaactaattgtgatgcaaccttgtcaaatgcttcttcacgttcttcttcaactaaatccttgtgtgaaaggattaagcggttcttgttaggatcaatttcggtaatcttaagtttcatagtcttaccaatataaggcttaagatctgaaacgtaacggtttgaaattaatgaggctggtaagaaaccacgtgtaccaacatcaacaattaaaccaccacgaactgatgaagttacagtaccttcgacagcatttccgtcttcgaagtctttttgtaacttgtcgtaggcttctctttcctttaagcgggtaactgagaagaagaattcaccattttccttgtcgccaccggctcttcttaatactaaggccttaaacttgtcaccaggcttaactaaatcacgtaagtctgcgttacggtctgaagtgtattcacgacgagtaatgacaccttcaacaccagcgttttcaacaccaacatcgatttggccgtcttcaatgtctaatacttcgacatcgacaatatctccgacctcaactccttgcatttgctttaatgcgtctaaaaattgattactgttttctgacatatgtacctcccaatatcatgtcccattttataggaaaccgagatatttttctactattttgtgctattttttctaatttttttgttttttttcgatttgagctaaaattgcctctacaacttcgtcaatcgacatgtttgtggtgtcaatttcaattgcatcatctgccttttttagcggtgaaattttgcggtgagaatctttataatctcttgctgcaatatctttttcaatttcatcaactgtttggtcagatttaataccacgctctttaaaatctaataaacgacgttcagcacgtgatcttgctgaagcaactaaaaagatcttaacttcagcgttaggtaaaacagtcgtaccaatatcgcgaccatccataatgacatttgtcttgcctgccatttcacgttgcagacttaccattttttctcgtactttcggcaaagcggatacttccgaaacattagctgaaatttcaggcgttctaatttctttagaaacgtcctttccagctacatatactttttgctcaccattttcagatttcaattcaattccatcttcatcaatggcattcaagatacccgcttcatcaccataatctaagttatgattacgagcaatcactgtacatgcacgatacattgcccctgtgtctatatagacaaaggataatttacttgcaatgattttagcaactgtacttttacctgctgatgcaggaccatctactgctacttgcattctaataaaaaagagatcttatcatcgaccccttttatcctttctgaaagattatttcaacttaagtgtctgacctgcttcaatatttgaagagtctttaagattatttaatctggctaattcatcaacagtcaagccattcttttctgcaatttcatttaaagtatctccactttggactaaataagtcttaggagtagcagaactactagatgagcttgaactagccttttcagactttttcttgctaaaagaagatgatgaggttttcttagtcttaacagacttggatgatttagaagaaaccttcttaactgtttgaacttcttcagctttttctgaatggcttgaagccaaacgatgaacaactgggataagtgcaattaaaataaccgctaaaattataataactgctatccaacgtgctgatccactaggctgactatcttgtgagcttcgcttttcagtaggtcgttcatagtgctgatatggcccggttgactttttatccatcaaaaattcctccattcacttaacggattaattttagcatattttaggatgctttgaatatgaaaaatcccatcaacttaaaaaattgatgggatgataacttaattcaaattaaatctcttacgaacgaatggcttaattgttttcaaggtagcttcaaacaataagtaaacagccacagcgttaattaatccttttaacaagttaaagggcatgataatactaaaaatgtaggttgacattgatggtaaatgcaataactgacccaagtaaactttctcagtaaagcttaacaaggcactatagctattaatagcaggcaagtttggtaccgctgttactgcgtaaataggagtcaaaacgaaggcattagccaatgacatcactgctgccattgcgataatcccaattaccaaaccacaaattggtttaactctgcccatcattgtcttgcggttatccgcactcacatttttacttaataaataaaatggaactgcaaatgacattgaagctaagaatgctgctagatttccaacaaggcttggtaatgcaaaaccactaaaaattaaactaagtaacattcgaattaaagcaataataactcccggtacaatgccaaaaataaacattccaattgtaataatgacatctgaaaaatcaaactttaagaaggcaactccaggcatgattggaaattcaaatttcataactacaaaagcaatacagccaattaaagcatatgcaatcacattagttaaactactattcttggatttagcttgatccataacttactttcctttcccaaaacaaaaggtctattgcttcagcaacagaccttaaaaagtgtagtaagtttttttagcctgtcttcttccatctagactttaactatcggtatctaacgattcaaccactgacgtgggtcgcggactttcaccgccggtcgggactttcaccctgccctgaagacaataaccttgaatatttaattacagttataatttagttcaattgcattaatttgtcaacttcatgcttcgataattcccgatattgccctgatgtaagcgaatccagagttaaaaaggcatatttttcacgagcaagcttatcaactaagtgacctactgctttaaacattcgcttaacttgatgataatgtccctcatgaattgtaatttggacaatttgtgtgtctttcttatgatcagttttcaatactttgaccttggcaggcgcagccttaaaatgatccaactttactccttgagtcaaggttttaatttcatcaggagttaaaatccctttaatcttggctacatagaccttagccacttcatttttagggtgcatcaataaatttgctaatttgccatcgttagtcattagcaataaacctgacgtatcataatctaatcttcctactggatacaaacgatatggtaaatcttcgaaataatcaactacagtttttctaccacgatcgtcttctgcagtcgaaacaacgccacgaggcttataaaacaaatacgtgtgtaggctttcccgctcaattggctcatcatcgactgtaatattactaaaagtatcgactttagtacctagcttagtaacaacatgcccatctactttaactcgaccggctacaatcattttttcagcttttcttcttgaagcgattcctgcttccgcaattactttttgtaatcgttctgccattttctatccctctttttctaaatgtttgtctgcgctaccttttgaatcgaataagtcaatctcctcaccatcagttgtatcctcaaagtcttcgattaacggtaaatcagccaaactttgataattaaaatattgtaaaaaataatcagttgtaacatacaacttaggatgacctggagcatcttttttgccgtcttgtttaattaatcctcgccaaatcaatgtctgtaaagctcctgatgaatttactccacgaatatcatcaatttctattctagtaattggttgtcgataagcaataattgagagaatttcaagtgctgattgactcaaattcttagttaaatctttttgaaaatacttttcaattatcttagctgtctgttgactagttgtcatcttataagtatttgcaatatgaattatttgcattcccgagtctggatcagccttcattttttgctgcaaacgagtgactaactgacctagctcttcaccatcaacttcaagtagttcaattagattttgctcctcaagcccattgtcacctgcgacatacaaaagagcttctaaatttgctagtttacttgccattcgtatcaattctttctaaatttaaatcaccgaattcacgtgcttgtgtaatctgaattaattgttttttacacaattctagtgtcgctaaaaataagccaataacatctgagatattctgcattttgtccgcgcaagcaaagaaactaacttgcctttttcgtttcaattgtccatgcaaaaaatccatcatctcattgatcggcgtttctgctactctaattgaagcggtatctggttgctgcaacttcaaacgatgtaagaccatcgtaaaagtcgtcgctaattcttgtgcagttatctgacccttaggcagcggttgaactttagcagtggttgatacactagcttctttagcaactgtaatcggtacttcttcattacgttctttaaaataagcagatattttcttaaacacagaatattgtaccaattgttgcactaattcgtctcttggatcttcatcaggttgaatatcatctacaaaatcgttttgaggcaacaaatactgtgatttaattcgcaataaagttgatgacatgacaaaatactcgcctgcaatttgtaaatttaagctttgcatttggcgcaagtattctaaatattgactagttatttgggcaattgggatatcataaatatcaattttttgcgattggatcaaatgcagtaataaatcaagtggtccttcaaaattcggtaattctaaagttaagttacttttgtccattatcttcttctaccgtttttaataaatttgtatattctggtacagcagttattcgtttatctggatattcgtgctttagttcatcaacaattttccgttcataactaatctcacgaaaaccaggagctaaagacaaatatctaataattacaaactgattagatacttgggttcctattacgcccaccatattattttgactattacgataaagatacaaaataaagtcattttcatcctgattaagcgtgatttcttcttttaagttttcgatatttttaaaatcaggtaaataggatagtaatcccattgctatcttctcataatcttttttatattgtattagcatttaatcacctaaagacgaggatgtgtcttctgataaacatttaaaatttgcttttgtgataaattggtatagatctgtgtcgtgctaatatcagaatgtcctaatatttcttgcactactcgcaaatctgcgccgttttctagcaaatgtgttgcaaacgtatgacgtaaagtgtgtggcgtgacatctttagtaattgccgccatttgacaatactttttgatcatctgccaaatagcctgtcgtgtaatcttttttcctcgattatttaaaaaaatatgttcatcgcttttccctacttgtaaaattagcggatcacgaacttcattttcatatttttttatccaatcaagagcaacaggactaattggaatcaatcgttctttttcgcctttaccaagaacccgaactaagcctaaatcgtcatgtaaatcctgcaactccaaattaattaattcgcttactctcattcccgtggcatataatgtctctaagatagcacgatcacgtatacctaactttcgtttagtatttggctgctcaagtagcctattcatttcagcttgagagagagctgtcggcaaacgacgttcttttttaggcaaatcgatttccaacattggatttaacttttgaatattttgccgagctaaccattgataaaatttacgcatgctagaaataagtcgactaattgagctggttgctttgttcaaatcacgctgccgagctaaaaacgcatccacatcgcttgcttcagttggccatgaagccataccttcattttctacaaaagtttgaaattcttctaaatcttgacgataagcattaattgtattatcacttaatcctcgttcaacttgactatagcgtaaataatcatcaatttgatcttttaaattaatcttctccattatcgttctcttctggatccttaattaaagtaatcgtacctgctgttttatcttcttcaattaatccagccttgagcaaatgaccgaccgcacgtttaaaagctgattttgaaataccaaagtatgatttaatttcttgtgcacttgatttgtcatagaaaggtagagtcttggtttctcttctccgcaaactcatcaaaatcatttgcgcatcatcatcaatttcttcaaaagcacgaggcaaagcactcaaattcaaacgtccatattgactgacaccgactactctacccttgaattgctcacctagtctcataggacgtggcatctgcgattcatgtacaaagccaagataataatcactagttaaaacaaatgctcctatctctcgtgtaacataaaccgttgcaaagacattttcattattcattccacgtggaaagttagcagctaattggtcaaaaatattttcatctgctagcttagcccaaatacgatctttttcgtcagtttctaatcttactaaaagtcgatcatcacgtcgaggccatctttctttttctctaggaagatcatccattgataaaacaacgtctttatcaggtagacctacatcaacaaagacgcctaagcctggacgtacctcggttacttttccccaaccatattgatcgggttgcgcgaatggcaaaaattgtgtcatttctcgatcatgacttttattatcataaataaaaccttcgacttcatctccaattttaggaatatcatcttgcgtaatctcgatcttcttcaattcataagtcagtccatcaatttgaacataataagctttatcgttttcgtcagtaatttttcctttacgaactgttccaagcatttaaaaatctcctactttacatattcttacatataagtataagagatttttatgcaaaataaaatagccagcacttaagctggctattttttgattagctaatctatctaaattatattcttaaaattaaaggtttgagattttgccttggtagatagcaccacgacgagcgtcaacagtaatagttgaaccatcagaaatcttgtcagtagcgtcagtagcaccaacaacaactgggatacctaatgataaaccgataactgcggcatgtgaagttaaacctgaagcttctacaactaagcctgaagctttcttgatagctgggttgtagtctgggtcagtagtcttagcaactaagatgtcgccttccttaaccttgctatttgcttcttcagctgagttagctacaacagccttgccgataactgaaccgttaccaacacctaagccttgaactaacttgttaccgatgatttgtaacttcattaagttagttgtacctgagtcaccaagtggagtacctgcaacgataattacaaggtcgccatcctttacgtaacccttttccttagctaccttagcagccatttcaaacatgtcatcagttgacttaggcttttcagtcaatactggttgtacaccccaaacgatacccaatgagtgttgaaccttttcgtcaaaggtcatagcaataatgtcagcatttggacggtacttagaaatcatacgtgcagtgtaacctgagttagttgcagtaatgatagtcttaacacctaattcttgagcagtacgtacaactgattcaccgatagcttcagttacgtttgaacccttgtaagcttcgaatctttgaagagctaaagtattacgcttaagcatttgcttttcagtacgttcgtcaatttcagccatagccttaacagccttaactgggtaaagaccatttgctgattcacctgaaagcatagttgcgtcagtaccatcaagaacagcgttagcaacgtctgaaacttcggcacgagttggacgtgggttttcttgcattgagtcaagcatttgagtagcagtaataactggcttaccaagtgcgttagccttgcggattaggctcttttgtacaaatggaacttccataaatggaatttcaacacccatgtcaccacgagcaaccattaaaccatctgaaacttgcaaaatttcgtctgcgttgtcgataccttcttgagattcaatctttgggaagatcttaacgtagtctgcacctgcttcttcacaaagcttacggatgtctaagatatcttgagccttacgtgcaaatgaagcagtaatgaagttaataccatagttcaaaccaaacttaatgtcatcagtatccttttcagtaatacctggaaggcgaatttcaacaccaggagcgttaacacccttctttgaaccgattacaccagtgttttgagcttcacaaacaagttctctctttgagtcgtccttttccttgatcaaaaggtcaaccaaaccatcatcgattaatacgtgaccaccaacgtgggtatcatcgtataaaccgtcgtaggtaacgtggatcatgtccttgttacccttcttagtggcatccattgatacacggatcatgtcaccagtattaatagtgaacttgccaccttcttgttcagtggttctgatttcagcacccttagtgtcaaggtcgataccaagaagtaaaccagtatccttttccacttgacgaaccatcttcatacgagcaaggtgttctgggtggtcaccgtgtgagaagttgaaacggaatacgtttgcaccagccttagctaaagcagtaatagtttcaatatcgtttgaagctggccctaaagtactaacaatcttagttttcttcattattaaaaaaatcctctccaaaaatcaactaaattaatatttagtcatttcttcatttacatccaataacgcataatcaccttggtgtttaccgtcaaacaaatcaagaatgtcgtgggtattaagttcaccattctccatgccgacagctaaaccgcccttcccatcgagaagtaacttaacagcataattacccatcttagtagcattaactctatctgtaacagtaggtgagccaccacgttgcatatgcgcaaggacattagcacgagcatcaaagtcaccatatttaaggagttcgtccttaaacttatcagcagccataacgccttctgctaaaacaatgataccatgatctttgccatctgcaaaaccacgagtaagagtttctgcaatttccttaacatcgtatgaacgttcaggaattacaattgcgtctgctccacttgctacaccgacacgcatagcgatatcaccacattcacgacccattacattaacaacgaatacgcggtggtgactgcttgcagtatcacgaattttatcgatagcatccatagcagtacgacaagcagaatcaaagccgatcgtgtagtcagtataaggaatatcattatcgatagttcctggtaaaccaactgagtttacgccgtggcgagtcaaggctaaagcaccatggtatgaaccgtcaccgccaattacgataaccgcatcaataccgtgtttctttaattgctcaacacccttttgttgcacttcttcttgtgcaaattcagggaaacgagcactgtacaagaaagtaccgccttcactaatcttgtggtcaacattttccgtggtaagcggaacaaagtcacctgcaaccaaaccagcgaaaccataacgaattccaaagacttcaagcccatgatggatagcagtcttcgtcacagctctaattgctgcattcataccaggggcgtctccgccactagttaaaataccaatccgtttcatgaattcacctcatcatgattattttgtgtaatttctcacatcacataaatattaacattttttaggcaaaaaagctcacaaaaattgggctaatttatgctttctttccgtatttaagtttgttagcacttacatccatcgtcaaagatagctttgtaatttgaactttattctttaaaattaacttttcgcaaattggttaagaaatactgttttttattttggtcaaatcgatcaccttgaaccttgactcctagtaaataaatatctccttcttttaaaatagagccaaatttttcataagccggtggaaaaataataatttcttgttcgctagatgtatcagcaaaactagcaaaagccattgtttttccatttttggtcctaatttgctttaacttcattaatttacccacgctaataccactatcatttaactgaaattgattcaatggtctagcgttaaatttttgtgcatatttttgtacagctattagaggagtagttgttgtagtaaagcctaaagctttctcttccatttctgctttttgggcagcagtcggtggctcagcaggcttaagtggtgcatcccccagaatctcagataaagacatattttgtcccgttaattgcacattagcaattacatctttgcagttaagcaataactcattgcgattatcttcgattgagtcaaatgctccagccataatcaatgcttcaattgcgtctacttgtaagaacttagcatcgattctacgcaaaaaatcattaaaagacttatacggtttagtattggcagctatttccttagcaaaatcaagacgtaatcctttaattgcttttaaaccaactaaaatcttgccatcttgtaaagtatagtctaattggctgtgattgatatcaggcggcaaaatacgaactccagcttcctgagcttgcatcgaatagctttgcgctttagcagacgttgatgaattgagcatcgctgtgtaaaatgcagcaggataatgaaccttcaaataagctagccaaaaggcaatcttggtatatgccaccgcgtgtgaacggttaaaaccatagttagcaaattgctctatataatgataaactcgctcacctacttctttaggatgaccttttttgaccgtaccagcaataaattttccacgttcttgctcaatgacattctgattctttttagacatcgcacgtcgtaaaatatcggcttcacccaatgaaaatcctgccaggatttgagctgtttgcatgacttgttcctgataaaccaaaattccataagttgattgtaaaatttgctttaaactgggatcaggataatgcacagtagccgtaccattttttcttgcaacaaatgcgtcaatattttgcattggacctggacggtataaagcgttcaccgctactaggtcctcaaaattgtcgggatgcaatttacgcaaaacaccacgaatcccaccagattcaaattggaagactgcatctgttttaccttgttgaaacagttccattgttttgggatcatttaacggaattgtattaggatctagctttacaccttgctgccgcactaaagctaaaatattgcctaaaactgtcaaattgcgcaatcccaaaaagtcgatctttagcaaacctaatgattcaacatattttttggtttgctgagttacaggaatgccgaaaggaccagcctgcaatcccgaaatgccagcaatcgaatcatcactaatcaccaatccagccgcatgaatagaataatgccttggcaatccctcaagtcctaaagcagtcttaaataacaatttattctcaggcgttgcatcaaccaataatcttagttctctagactcttgatgtgctttttttaatcccattttatctttagagtacgggattgcgtgagtccacttagtgatttctggtcctgttaagccaaaaacccggccaacgtctcttaatacttgtttagcagccattgtaccaaaagtcaaaatttgagcagcatgatccatgccatacttttgatacatatacttaattactgtattccgttgaatatcaggaatgtccagatcaatatcaggcatctcatgacgagccggatttaaaaaacgctcaaacagtaaattatattggatgggatcaacttcagtgatacgcaaagagtatgaaaccagtgaaccacaagctgaaccacgtcctggaccagtagtaatttttactcggtgacaatagttaattacatcccatacaatcaaaaaataatcatcgaaccccatctgattgatgactcgtaattcataatttaatcttttctgatactcggctggaatacttttttgaccaaagcgcgcttgtaaaccagtttgagccaaataacgcaaatattcttctgaagtcggaaacttatcttgatgatatttaggtaagaccggtttttgaaagatcacttcagcattacatttctgagcaattttccaagtattattaattgcatcatccaagtcatattgatgatagcgttctaaaacattttgtgcagaatctaaataatgcgaaccagcttgcttagctagtggcaatatatcttgcaatttatctcccttagcaatcgcacgcaaagttttttgtaaaaattgctcacgtggccgtaaatattgactatcttccactgcaactaaagataattcaaattgcttagctaatccacggacataatcaatgtaatctatacttgcttttgaagcatatacacccaaataaagatcaaacgttaacttctttagttggcgaacataatcactgcctaatgcctgatttgtatcatgcagcgccattaattcactttttagattagctggtacgataatcaacaaatcatctaaatatttggttaattcattcagcgttaagaccttatcgttttgcccattttccgttaacaaatttaccgcgctagaaagtcgcaataaattatgatagcccttatttgttttggcaaaaactagcaaatcatatttttgggtgctatcaaccaaaccatttaaacgcagttgcatcccaagaagtggtttaattcccgcctttttagccaactcataaaaattgaccaaaccataagtcacgttcacgtcggctaaaccaaccacaggatagcccttctctttagcgtcttttatcaaatcacttaccttggttggactacttaaaagcgtaaaggagcttatgttttgaagtgctgctacttgcataaattaaccacctttcgtcattacaaacattaaattaagtataccaaattgaaccaatcaggtttgaatttgcgcttcatttttgataaaatcttacacgaaagaaggaatcattatgggtcgttatatcatcacaactgtatggagcgtaatctacatgttagttgtaggctttattgctggtcctttaacccgaagtgcttcattcaacggcacagatttaagaaattgtgtaatcgttgggatcatttttggtattcttttctcagcaattattgcgactattactgctcgttcacacaaagataatagtaaatacagtaagttaaaataattattcaatctattcaaaaaagacgtgagatgtttttattctcacgtctttttcgtttggtttagtaaaacttataattcttttttgtatctacttcgactggtccatgagtcaaatattcgctaaacatttgtacatagtccttatccaaagtggtttcaattttgtccatactatattcaggataaaatcccccacccatagcacgatagttgttaactgctaaatgataaatctgatcatctttgattggcttaccgtgcaaagttagtttagtcagccgttcacctactggtctggataaatccgcttcatattcgactggataaaagacgtcaaaatgatacaacattggcttaggcttaatccatcgatcaataaagccaatgtttcctgcttcatctttcttcaaaaagccagcagagtgctcaataatatgacgtaattctttaccagtcagcttcacacgacacaactgattagcatacggataatttaacaaaacatctctcatagtaatggtcttatcaaatcccttagctgtctcactcatcactgcagttgccgaaacatcagctttagtaaaccataattgcatttgctggattaaattaataaatggcgcgccttctattctgcctttcattgcattttcaattcgagcaggtttatctaaatgtgcaattggttgatctagccatttttgtgttcttttatccaagtcagatacaatatcaacaattacaggatcaggatcataatctttagtgtcaatcaacttagtggacattgatttgattttcttagtatcatcatcaatatcaagaaccacttcagctacagcttcaccgcgataacctggttgaacaatagcagtatcgcgtgtaaccaaatttaagcgccgatgctggtgacctgtcaataggacatcaacttctggaattttggttaaaatctgataaccttcattttcaccacgattaggttcagtcgccttaccagtttcaggatcactttcaaagccaccatgatacatcacagctaaaatatcaacctgagggcgtaatattttggcataatgcttaattttttcgtaagcagaggcaaactttaagccttttacattttctttaggttcccaatgtgggatatattgcgttgtaatccccaataaaccaatctttaagccatttctcttgataatagtgtattctctacccaaaaatggaacttctgtttctgcatccagtacattatcattaatgattggtgcctcattgttatcaacatagtagcttaaataatctaatccaaagttaaaatcatggttacctaaacagcgagcatcataccccactgcattataagcttgcgtaaaaatacgtaaatcactataatcgccagttgaatgagcataggaagcaagtggtgagccttgcaaacaatcacctgcatcggtaactacaacattgttatcaccatactttttcttttcagatttaataactgagctaactctactcaaactaaaaggagcatgatagtcggttttattttggtaatcagttggcaacaaaaatccatgtgtatcactagaatgtaaaaatactaaatacatgtttgttctcctatattattattgtgcgttaactaaagcatttatcaccaatttaatggttaatatgctcactgtttgttagttttatttagccattttttagtattgttttcaactacaaattacttaatacacgcaaaagcgtgtaatttcaataaatatttctaaaaaaacacgcaaaaaagaccgccctaggatccttgtcccagagcggtctttgcgatatttggagtttcctcctatctaaattttcctagtgctttaccatacttgtctttagcaacgatataaccacatttaccgtttgatcgtggctgtcttaaccacaatcttagtgggccttgcaaagttgcatcatacttcactacgctacctttgctaagcttagcgatagctggtgaatcaatgtggggttctttgtgaattgctaaggcttcacctaagataaactcaccagacttcttaacccagttaggtttcttcttagctacggtcttactgcccttagctaattttttccagccttcaacagtggtattaaccaagtttctatccatgttatcaccagtgaattgccagatggtataagttttccatggtgatgttggaacgttcatattagggacattccagctcttccaattcatacttggataacatgctacccatagtccacatgtcttagcacagttagctacttggtttaatgcagatgattgaacataaactaaacaccatacgccactaagtctatgaaattcagtaacaaaacgtttcacccaagtggtattgccccagctacggttttcattgctttcccaatcaactgcaggaacagcttcaccaatatagccttttacattgtgatagaagtattgagcttccttttcaggattaccaccttcacaatagtgataaattcctaattgttttcctgcttttttagctgcttggtaatctacgtcacattcaggatttacgtaccacattccttgtgttgccttaatcatagtaatatctgtacctgattgtgtagcaaaactacgagaactatcggaatacacgtcacacattttaagcattagtatcagccttcttaccttcgtctgctggcttatcttctacagtatcaatcaaattttgtgttcttttcatagcagctacactcttttcaatttcaccgccaataaattggcttgaaggatgtggtaagtgagctaaatcaagaataccaagtacagtgttcaatacttgagtaaacttagtatcaccatcaccacctgatttttcagcttgatatacaagtggttcaacggtcttagccactaattgttcagctttagcaagttcattgccttgcatagctttacggtcaatttctactttatgtttagtatagatagctacaattactaccaaagctacacttgaaattgtgattactaaatccatgatttgattaatcgtcattttttaacttctttcttaattcatcattgtctttttcggcatctagccattttcttctgtagatttcagcgtcctgttctttctgcttaatttcttcatctttttgccgtagcagtgtggtgagtgactgttgtttactactatcaaaagctttgtaaaaaagcgttatagcgctaatcacaccaccaattgctgtaataatgtatccccaattcactcatgacacccactttcaggcatcacaagcagttagataaacaaatccaaaaattatcagatctccccatgctgaatgccccattcgatagaatggagtaaagatgccatgcgttaattgcaataatgctaaaaccatacaaacaataccaactattacaagaaatactttactggcaataattagcatgattttgtatttagtattgctaatatacggaactaaaaaagcagatagcattaacaagattcctaacaaaattaggaagcagtcaatgtatctactgttttcaatattctcaaactgtggaggataaatgaagtagtggctgtcatgaaacagccaaacacctttacctaaaataaaaagaccaattaacagttcacaatttctaattgttaatttagccttccactggtttagcttcttcattgctaccaccaacgatttcttggtattcagcttgagtaattaagcccatatcaatgtaacttcttaattcatcttgactgataaaatcgttatcaaattcaaacttgtaaatctcaaacattacttattacctccttcaattgctggtgtggtgttttgtgttggttcagtaggttgagtagcagctgcagactggttttgagtcttaaccgcttgtaattcttttctgatttcacctacttgaacatttgacataatgaccaaagtagtaagcttatctaatttcttatcaagttgatcatttgattgagtatttgactgactgtttgattttaattcagtaacagcctcttttacatcttccacagtgtgaagtaaagcatcatctgaagtgtctacccattcatgagctgtgtaatcatatctttgatgtgtaaagtttggatttggagttttagttacataaggatagcctttatcactcatatcctttgtggtggtgtatggaccatcacattctctgtattctccattaataattccagagatccaaaatgtactttcatttaattctgccattttattttcctttctttaaataagtatgtcgttcaatatcaacgaccgcttatattatgtgctatctaaatattaaataaagtttgcattctacctcacccttaggtaaacaggttttgtcttatgaattaatccaagcttgtttacatttagataagcatcaatcatctacgccacctccttcaaagaagcagcataacaaagcctatagtgggcttttatccccccccagcttagattttaatgcttgaatttcagctctaagatttaaaaagttagtgtttgcatctagcggatttggataccattgtggtagatcatatgactttgtaataatcattgaaccaatgttaattgatgctccagcatcattttcaattcttatcatcatcttattaacattctgcgtcatcttaaaagtggctgtaatccaaacccaatctaaagacttatttgctttgtaggaaataatagtagaatcattagacaaactattataagtagtgtttcctaccgtagctttaataagttgacctgtatttcctttttcagattgcgcataaacatgtaaatttccatttccagaaggattgtcgatttttatatatgcaccccatgttagtatttcatcagcataagctgccaatggttgacatatgccaccccaagaccagttgtaaatactcgataagttagaattgggatcttttgaagatgaaagtgaaacattaataacatctccatcgcttttataccacttaccgctaaaatcacttgaaccttttagtaaatttgatggttgtttatctgtttcgtccagtaatctaacaccatttgcataaatgctcattacgccacctccatttctgaaggtacgtaaagcattgatactagtgggttagctggctgtctacccgtaccagcatatgtaatttttgaccatttagcattctgcaacaaatcattaggcaatgtaacatcattttttgtaattagttcatcaccatcaacaaaaatattagccatgtttagctcctttctaaataaaaaagagagcaaatgctctcttacttactttttacaacatggtcgtttatcatgaacgacagctttaattcttcgatgaatatctattgggtgctgccatctatagaccagcacctacatcttgagaagtaaagccatacactgtcaataccagattagtatatgaatagtttgaggtgtcgtcataattggattttgtacggacagctaatgtggtgttgtccgtaaaccaaactgacatagctccgggactgtcttcattatcacttcgcttgttatttattttaccgcgtttcaataacggtgtgtgaaaatcgttttcaagagcattattgtcagcatcttgataaaatacctttacaataatttggtaatattgaacatccgaatactttgcatcagcttgactaaaatattttgtcatatcaatagtaaaagattgatggttccattcactgttattatcaccaccaatataaaaaatatttaggttttctgctccatttccattaagaaactcattttcacctagagcataacctagaacttttttgccatttatcgttaaagccatacggtcaccttctttattctgttatttcatacaacgtatttggatctttagtagcaagcttatcgtagtcagctttactaattacggtaggctttttcatatatcctgtttcaattgctgtaactctgttgttagtgttattcagatccgtttggttaaccttgcttgataaatcaacagtgatattagcattgccactatcatcagggcttatctttgcgccaccgtttacagtgatagttttaagcttaccagcgttgctaatttcagattcaagctgattctttaagctgtctgcatcagtctttaaaaataccgttgctttatcggctttaccgtccacagcgctttgcaaaccacttaagccactcacttgagtttgcaagttctgtagtgattcatacaagctactaatagtgattgtcttatcaccaattacagcactggttggtccatcatcaggatcataaatgccaattaccagtgatccatcatctgctggtttcaaactagcatcataagccgcttgaggactgtcgcacttgacaaacgacagcttagtggctagcttttgtgttgtttcagacttagtaaagtgatcagtattaatattgcctgaactatcaggttgaatgttatcaactgttttaactttaccagcttgcgcaagtcttaagtcagtttcttccttagtgtagtaatttttaatggtgtcccctgtaacaaactttgaaaagtctaccttatcaaattgttgtttcaaggagtccattgatgctacagcatcatcaacttgtttacttacagtggtaagtttttgatcgttagcactaatactatccttaattggttgaacagtatcattgaaatccttaactgtggaagtcttccacgagttgtaatctgactgaatgtcagctaattcttttgtcttttcctgactcaactcttcaagagctgcatcacgttgatcattgattgacttaatagccgctgtaatatcagcctgattactggttttaagatcagctaattgtgcatcagctttactttgaatagcttgttcttgactagcccaatcacttgccagcttattgtatttaatagagtaatcagtaaaatcactgttaatcttagtaagtactgcttgtgcttgttgttgtgcattacttgaatctttattcaattgatcaatagtagcttgtgttttttgagtagcacctagcaggtggttttccatagcaataagactacttacataactatcattgataggcttaacagttggatcaactttaacttgaaaatagaaatcttgtgtagtatcaacaatagtgtcgccttgcttaatttgaaagaaacaagtgccactggctgtataacattggtgagtcatttgataactaaagtgtcctttagttcgatcaatcatgttgaatttaccactttgctcaccagtaccatcatcagcaactacacgatcactctctttaatttctgaaaatgaaacatccttatcagttaaatcatagggagaatcatcttcatttaaaattgttacgtccagcactaaacctttttcagtagaacgtaaaaccctcgtgtcgtctgacacgggggttattgatttatccgtttttaatgttatcggtcttagactcactctctttcaccttctttctgtgaatttcttgaagttgagtatttcttaaccttaaactttgattttctttttctagtttcgctattttaatggattggtttgcaataacagttcccaattcatttgctacaaattgttctaatgtattcatttttataaatcccaatacttacttggtcctcgccaatattgcttaatccatgaacctaatacaggttgatcactgcttgttacaacaacattcctaccaccaatctgtgcttgattaggtccaatgtgtgtaatagcaccactatttttatcatgaatatttactgatccagatcccaaattcaaagtataatttggagaatctaaactcaaaccaccaatttcctgactaggatttagtaaattagtggcatctccaaccgcaattgaaatgccatggttttcaacgtgtaaaacaccgttaatagttcccaaacttgtaattgtatcagtcttaatgtgtgatgcatccaaaatagggatatgagcttgatcaacaaagaaattgccagttacttcaccacttgaatcatcaataccaaacaaagcatgtggattgccataaatatcatggaaattaaaacctaagccattaaattccatataagaaccatcattgtttttagctctaattgccatgacgttattccaactggtagagccatcactggaaataggttcaagcattccgccaccaccagacttcagaaaattatcaaagttatctatgttagtaaccatttcctgcatgtggttagcaaaatctttaactgattcatcaagtactaaggtcttcttgccagctttatcagttttatagtgagcattacctaactttgccattaaggtctcccatgcttgagtttgggatgtaccttgcaaagtcatagcttcctgaacagcaccaataaaactatttgatctggcaatggcttgacgtgtggaagtgattttttcattagttctatcttcactagcttgaacaagtaggtgttcatagctagttggcaaatcacctaaagttacatttaaaaaaacgtgggctaaacagtcccacgttgtagctgtaacttcagctttttcagtaatttcataatcaggaaaactaacatccacatagtcataaagacttagttgagtaaagtcctgatcattatctgacatgtcttgataatcaagtgatgtttgaacttgcatatgaccatatctgtgttcaattagatagttcttaccaatttcagtagcttgatcaatatcagcttgtgtagcaacaaaactaccatcactttgctgaccgcttaaatcctgatcatcatgtttgaagtaaccactaatatcaacagtattaacgctatcaatgttaggatttacaccaaatccttcagcataaagtggaccaatcttaacagttacttccttattagattgatcaacatttgcgttgtagttggtgtcagtatcagcggaattatctgtatcagcatctgcagatgtaatatttgaatttttgtcatcaatatcatcttcacagagccatccattttttcctttgtaagttacttcaatgtaagtcttgccatcaccagattttgcttcatgaccattaacaacagtgaatgtctcaccattaggaattgaccagtttaaagcattcttactgtcaggagttgcataaatttcaaccttggaatgatctttaagttgattattaataaagtcatcaaaggaatgtggtttaactgaaccatctttagtgtagttaattgaactagattctacccagccatgactcgtgtgcatgtaggtcttaccgccttgagtaattgttttatcaatagtagacatcccttttttagcagtaactttgactttcttttgcttttcggcccagtaattagcatgtccgtaaactttatggcgtttcttgcctttaccagcccagtgccatgcatgtttgccactaccttttttaataacagtagtattgctagacaccattttatggtccttagtaaagtgatactttacagcgccatctttaacataaccataaccagagttgctgtattgacggtagctgtcttcttcagtaagtgataagtgtggtccatacagccattggtgtggtcctattctgtaccataaatcaccgtttgaattacgttcaaccatgtcatagtcaacaacagtaccatttttaacagtccagtcttgacctagtgacttaacaggatggtgatcaggaccaatttcaggtgaataaaatactctaattgattttcctttgccgtaagcaactacagcagagccatgaacagtaacacgagaacctacaccttcactatcaaacggattactgctcttaacagttaccgtcccactgacattgttaattgcataagcacctgatgtgtcaaaattgatccacttagaatcaatccagccaccgccatcactttgtgcaattggataccagctatcgctattaacagtgttaatttgatatttaccatcaggagtaaatgaaccatcattaacaatctgacctaagtgcagtttcatcccgttttgcaaagtaccaatgatcttttgaccatctacaggacaatcatagatattgatattgccgccagccatgtaagtgatacctaatgaatcgtaagtgctttcccatgtagcccagccttgccaattatttttcgcaattgcttgacctggtacatacttagcgacaaataccgcaccagtatacatgttctgaatgttcttatcttgactaaaggtggttttgatatttttaccataggtaactttaataccagaatcacgtccaatacgttttgaatgtctgatattccaattatcaaaatcaaattcaccgccaaacagtcctaaaactgattgagtaacagtatcaccttcctgatcaggatcaataaacaaattacttgcctgctggccgccttgaatattcactttacttactttgttaacatcggaatagaaagtaaattctctctgctcctgcatttgattaaggatttgattgcctaaatcttgtgcagttgcgccgtttaattgaatatcatcagcaacagtagagttagcaagtaacgcactaatgtgttccgcttcaaccaccacattatctaattcgggagtaatgtggatgattttaaaccattgatgtacgtgcttaggatcacagtcttccataatccatttgttaggttggatttccttttggtgcaatcctgatcttggataagtcatagttaaagaccaaaactgattagaattgccattaacctgacaatcaattgcatcaggaagaggaataccgctactagtaaaatcactggcaatactgtcataaagatgtggcattgtcatcaaatcagagtagtcaccataatcaacttcaggaattgtacctacagttaatttcattagatcaacctcctccaatttggtttgtattcagctttagtgatagtagtgccagtttcagcagtaacagtgatagtattctgacccttccacaatttaggagtatcaaggttaggaaaatgagtttgtgtattgtatagattgccatctgcatcataagtatcaccagtagcaccattaagccaaaattcaccttccatattctcaaacgtgtaaggcaagccattgacgtacaaagtgaaactaccatttgcaatgaagtgccaatcaggaatagcagaccatttttcttcaccaactaccacatcgctatcaggcaatgggatataagcaattccatcaatacgatattggaaaggctgacaataaaacggtattgcacatacaccaacaaaatcactagttacatctttagtaacagtgaatggatctttaacaatagccttaaacacatatgttggatcagcagtgaatttaagatattgatatttcatccgcccatcaggatcagttggagcagagagccaatcagttacagaccgttcccaatcaaaccaaccacgttcaggtggtctaagaatttcaagattaaaggtttcagtcacattttggtaagattgattattttgtaagaaatcaccatttttaccttttatatgtgtaggatcaatgtcagctgttggatgaattaaatcccatggcttttgtacgaccatgccaaaatctgttgaagcatggtcttgaaaaatcagcttcacattatcatctaaatcttgcacttaatccccttctttctttaatcatgtcttgtctacggtcttgcttgtagaacggctcaactaactcccacagcttgcgaccttcaggagtttcaagtgtgatatgaatatcacggttttgagcgctcattttttgcaaaactaaaagcatggcttttaataagtcatgctcatctttttcatctttattagaaatacgttgttggttagcatttaaattactgttagctgtaagaatacctacagccttgccaattaactcccaagcacgagttgacttacttggaataagcggaacagccatttcaggtcctgcttcaccaaaaatacttggcgaacttgcaatacccccattagcataccagtgagtagaagtattaaccttgtgttcccatgcagctttagcagtaccataacgtccacggatatagtctttcatccatctcaattgagtaatagcattagttctccaatctctaccagcagatgccattttgcttgctggtaatgattgtggaataccataagcgccacttgatgggttagtaattctaggattccagtgagattcacctgggattccatttccaccatcaataatcaattccatataatgccaccaagattcaggaatgccggcttgttttaaccagtgtaagtgatcacctgtaggctttccacctataccatcttcattttcggataaatgatcaccaatccaattaagtgctttaccacctaattcacgtttggctaaagctaacaaactaggcttaatcttaggttgatgcttagattgatcatgaagacctttaacacgatagtaaccatagcccattgacatagcatcagatattttactgatacgtgcataaggcggcgtttcgttaaacattgtacccttagctgggttattgataataccaacgtgaccagctgcaccagtaccatgaccaaaaatgaccaaatcgccaggctctgttttagataagtttttacctaagtattgaacacctgatgattcttgcatagccacagtagtacgaccaatgttaattccaaagtgacgtaaagcctgcattaccatacctgaacagtcagataaggtctttgacgcagcgcccatttgatacttaacaccgtcaaaagtatccttagcatattgcaagaacttagcacgtgaaccaccaccagaaccaatagctttattgataaccgtccacatggcttgagaccatggattaccaaagtgagtgccagaacgtttactcaaatcagtagaatctttagttaaatcagaaccaacatcatgaagattattggtaaacattgatttaaagctatcagcaaagtgctttaagctgttttctgctaactttctaagttctttcttgctaatgccagtaccatttgcaaagtgtggaagtgagagtgattgagtttgagtaccattaagaacaccccaaccttttctcaatagcatcctacgattattcccatgaggaataataatgtcattttgatcagttactacagcttcttgacgtggaccagattgagcatcattaacgactgctaaagtgtcatgagttaaacgaccatttgcatcagtacccttagcaaagtggactggattaataacagaactattaccaccaaattgctttaatacagcatcaataccacgaataccacggttgatttgtctgattgtgccacgcattgaatcagatgcataaccaaccattttatgcattgcaccgccaaaaccacgagcagtagcagtgcctaatttgattacaccatcgtgcaatctcttaacagattggtaagaccgtttataaagattactaaagtcttgttcagttgattttctgatcttatcagtagttttaccaacacttgaagtcattgacttgaaatctttaacagtcgctttagacatgctagagattttcttggtgaaattacctttgccttcgagtgacttaacagccttttcagcctgcctagaaatttgttcgccaaacttatcttttttagcagtcctagctaaaacattaagacgtttttcaacagtattaatgtttttgtgtaatgactttaattggctagtaccttttgtttttacactaacagtactctttttgcctttgatcttcttgattgccttagagagtgacttaacagatttaacacccttggtttttacagtaaccttatgagtgccacccttaatacgcttcatagccttttcaagggctttgatctgcttagatccttttaccttagcagttacagatatagatttactgcttaaacctttaagtgatgcaccagaagcgctgatacttggcacagaaacacgacttgaaccagatgaatatgaacgtcttgatatggacgttgatcttcttctagttgatttacgtttcttggtcttacgttttttagtcttctttgttttaggagcagtagtaagtttcttaaataaagcgtcactgatccacttggacttgccaattcgactattagcaccaagtaacaatccttcatccacaagcgtttcaccgtgatgaggattggtcttagcaacagctttacgttcttgactgatacgactagtaagcttatttagctgtgcaattaagcctttggtatttctaccacgctttagagcgtctctaatttctttagcgactttagctctatcagccttatcatattgttcatgcttaatcagacgcttacgctcattagcagtagcactatcatttttatcatgacgttctttttgcttttgatgacgcaaacggtcttcatcgtacttcttcttagtaagcttagttaatgtagtaagaatcttaacaggattcttagtttcaaggctataaagatcaacagtaccatttgcaaggtgaactgatcgaccaaacaacttagccatatcacgagcattaataacgtcttgccatggaaagatccaacgtggtacattcacaccctgttgaacttccacagaaccatcaggatttaaaattccttccttattattagtagctggtgaatcatgaccatcatttaagatagctggatagccatatttcttcttccaatcagtaccactagctaaatgaagtgatccaaccttaagttttccgtggaagaacttattgacgttattggcagcacctttgatgttatcaatagcatgactaaaagtactttgaatgccttttaataaactcgaccagaagtttttaagagaattgccgaaactcttaaaaccactaaaaactttgcctagtccaccatgtgtggcggaattgagtttcctatataaatcagaagcattcttatgaataccattccaaattcctttagcagttcttgaaatattcttccagttagctgaccatcttcgtttctcaatagcaagttgttttttagcagtttgaccaacggtcttaaacaaatcaccgtgatttttctttaaacgtttgctaaatgaagcaaagtttttaatcgtttctttattggctttgctattagtctttatgtaagatttagcaaaacgagaaacagaccgcataatctgcttagtacctttagaactatgtttatagacattatcccaagctttcttaaagttcttggataatgaactcttgaagtggttaactgctttaccaactttacttaaaccactcttgatgtttttaccaacaccattagcccactttctgaacttaggattattcttgtaaagcagtgctggaatgcctaacaaaggtgaaactgcggtcaatgctaattctttagagtttttcttagcaaatgacttaccttttcttaatccttgaccaaacttcttaccaacatctgctccccacttacctacttttctaaaagtatcatgggttgaccagcctaaattttctaaactccagaatttcttaggtggcttattgcgctgccagcctttagtgaaactattaacagctttaccgccccattgcccggcatatttaccaataattgcacccacaggagcaagcattggaccaacaacaggtatcatgctagttaaagcaccaccagccacagcaccgacagcaccaccaatatcttgactacgtttatcagcagagtgacggtccttaacagcattaatcacttcaggggttgcaactgcggcaccagctaaggcaccagttgctagacgcttacccatgctaaactttgtggaagctttaattcctgctgaaatctttttgcctacttcttgaccaaacttttttgcaaaattaaagccagacttaattttgctccagctccatttgcctgcctttgctaaaacatttcctgtagctctaaaacccttagctattgcttttccagcttttgtacctaaatcgcttgctttaacccagcctttttcaatacctgtccaagctttgatgccagctttttctacagtagtccaagttttacttccaacttttctaaagcggctaaaagtcttggatagaacgccaccaaacttagcccaagctttttcacctttagtagctttttcagcaagctcaatacctttaaatcctgatcttaatgctttaactgacttgtaagcagtaacagcacctttaccaatagaaaaaagaccgccactgactttaccaatgcccttaattgctaccattgcaattatggcatcagatatagtcttaacagcagtcttatttttagctaaatcagcagtagcagtagcaagcgtatgtaatgcactacttgaatctttaccattacctttaccaatattttggataatagctgcaaagtctttccaaacagccttaccaacttccacacctagagaaacaacatttttagtgatagctacaatatcacctttatttttatctaagtagccaataacgtttgaaatcgctttaccaagttgttgggcaccattcataactgctttagaagtcatgatattctttaaagcttgtaagccactagtctttgcattaaaaattggcttagtaaattgctgttccaatttttgacgagcgacctgcattgactttaatgcaccagcttgagttttgccaaaacctttgaaagcatcatcagaatatttgcttgcactagccatccattgctgaaattgcttttgtgttactttaccagtcttaagtaaagcaatcatcttagattgtgacatgccagcgcctttagctaatgcttgcataaatgtaggtgctgctttagtgattcgacttaagctggaataagttactttaccagttgaacctacacgctgaagactagctgatacacgttcaatctgatcaccagtaagtttagacgtatcacccacaccagctatagtcttagccatttgcatagcacctttagtaccaatcgttgaccaattgagcatgtgtgcttgcaaattagcaacattatcgccagtcatagcggtattagcttttaattcgcctaattgcttgtctaaagactgaatctgtctagtagacattcccatgcctttaaaccgaccattgattttagcaacagccaaattaaggttcatgccttcttcataagcattttttaagctagaaccaatgttgcttaaactattcgacaatgcattgcctaatgctgatcccataaatacttctttaaaagttctatgagttttttcagcttgactatctaaacctgtaagcttggtttttaatttgtcaaaaactgtcggattagctttatgcattgaagaatttaattcattcattgcactcttagttttagctaaagtcgtagcggtttgattaagcctaatttcttgacgtttataagcatcacttgacttaccagattcactagcaattctggccaattcttgagcttgaattttttgttgcttatttaaattttcaagtgaagatttatagccatttaatttagctttggctgattcatagccttttccttcagcttttagcctttcaacataagacttagttacagcttgagtttgctttaaagatttttgtgcttcagctaaaccagacttgtaatagttcaaggaagacttagctttttcttgttgtttagtaagagactcaagacgagtagtagcacgtaacgtttgcgcagcattcttttgaatttcttcagtagcattcttataagcctgcttgcctttttcagtagtttgatcagcttcagcctgaactttcttcaaatttctttgcttatcagctaaagcttcaatatatttgcgctgattttttacagtttcagttaagccggcatatttagctttagcagcttcagtttgtttaccagccgattttaaaaccgcttcttgagccttccatgcactagtagtactagatacagcttgtcttaattgccttaatgtttttacaggttgatcaccatttaatttaatatctgtaatcagtgaaccaactggtattcttcccgccattttttacctcctttctgttttgtctaaacttgctgcaaagtcccataggttcattggacgtttgtcctttggtcttgcactcattacttccacaagacggtagtaatcagtattttcataatcttctaaggacatatgagcattaacaatcatttgttgttcttgataatcaaagtcttccagcatttcctcataggcatgtactggatcaggatcattaagcattgtcgcttttggaatcgtctacttgtaagatttttccaattaagtcagtaacaaattcactgacatcacctggatcagaatcttcaatcttatctacttgtgcatctgataaatgaagaatcttctttaaaaacttttcttcttcatccaaaagattttcttgtgcagttaagacatcaagaattgattgatcatcatcgtctttgaccttgttaattgcaattgataattctgcaaaagtcttttgtgccttaagacatgcacgtacattttttacagttgtttcaacttcaaaagtagttaagtgcagctttttaccattgatttttactgacattgattgatattcctttcaaaaaagaaaagaacggcttttacaccgttcttgacaaagatattgatattaatttgccaccactacccaccctgctaattattagtgagtagttgatgatgaaggaatagtgtccttatgagtagcatcatcaggtcccttgtgagttggatcatcagcagttgaaccagttacagtacctgaaataatccaattaagcatcttgtcgaagtcgaatccatcttcatctgaatagaatttttcgtaaaccaaaccatctgatggacgtgcagcggcatttaaagtgaaggtatcgtgtaccaaagttgggttttcattatcagtacccatagttaaatcaccgccaggtttcaaattgccatatggcaacgcaaagtaaagatcaacgccaatgtttgagttatatgagtgagcaataacaccaccatatgccaatggggttgagtccttagccatgttcccaaagcctaacttgctgtccttttcaagacctacaattgcatcatagaaattgtgcggaatgtcgttagcaccaaaagtaccagtaatttgatatgcaccaaagtgttgttcagcttttgcgttagaaccatagacagcttgtgcagtacgacttaaaccagtgatgttagcttgagtagcacctttagatgattccaaatcaatcttaaatacaccatctttaccaatattagtggtcaaaccacctttggattcatcggtaactaacttaccgtccttgtcatatttgaaaacaagtaaatcatttaaaccttgaagttccatttttctctccttttaatttgaaagctaattgttggctcaccagaattagggtcatatgtgtgccctgtaaaactagctacgatttgccaaccattagctacgaaaaaagacatgagcgagtgttcaaattcgttcatgtttacttttgtgtttttactataaaaaacgtttatcgctaaacgttgtatctgttccgtgtattggttactacctgattctgtaaaatcaaaattcacttcactaacaagtatatccacagaatcacgtggagtacgctcactagtaccaactgcaaaactgtaggctttatgcaatttaggaagattagagctgtttagcaaatctactacctgttttgctacagtactcatttatctaaaatctctctgaatttttcagcattagcttttagtactgcttctgcagcttccttttctgcatgatctttaaaatgaaggttggatatttctttttgagacatatcacgtgtcccatcatttacaaaacgagcgaccattgcattatatttatcttcccagcctactgaagtatcaccagtattaccatcgttgacttcataacctgctttataagttatagcgtcacgcatgtgtttagacttacggccatgaccagctgaccgtgcatgtgcatagcttgtatgagacattggagtgttctttttaagcacttcagcgtaagtcttagccccttcaccagtgatagctgatttttgactagtagatagatcaacttttttagtgatcttatctagccaatcatttaggcctttatctaaatcaaccatcacggtctgtcacttttgtgagagttatgagatcgcctgcagttggattttgaaatggatcaagattgatgtcactcacttcatacaatttcccattgtattgagcatgagtaataccatcataatttctgcgatggtgaataacgacaataaaagattcatcgtgatgatgtccttgattttgaatcatttgagtagtagttaagccccatcgaccacataaagtagggctagttaatgctttaaattcattagtaggaagtccattatcatcttcactatcttctacagtaccaaaagtgatcctattactcagtcggtcccatgtctgtagttgtaccatcgtcattcaccacctttgtttcatcataggccccacggagttggcctataatctgcttagccgttgtacttgatacagcagatgtaggatgcaaaaaccaattagccgcaattgcattaactgctaacttatacagttcaaatactgattcagttttgtaaaaactttcatcagcatcttcaccaattgcgccttgaacataattttcagcacctttcaatgccgttttcatacgttcttcatcactagaatcaagcgcatcatcgtcaggtaagtaaccaagtgagcgtttaagcccatcatcaactgttaagtaagtggtcatcattgatcacctaatttctattagtgattagcagatccagcttgagtgccaccgttatcagatggaacttgaactgattgcataagcattggttgactctcaaccttgtcaaatgaaccagatacaattgcttcatcatcccaaatcttggtatcaaatctaagcaatgcacgaatagcagtttgattacgtctaaatgccttatcagcaatgttagaagtaagcaatgacatttgttgacgatcgtataaatgaataaattccttaaagttaccaaagtagaaggggtggctttggtacttaccactagcattagtgttgttaggtaaccaagtatcttcaacgacacgaacatttacatattgcatgccgtccatattgaaagtggtttgttgagtacgtgggtctacactcattgcacgtgtaccatctgacatacgcactttagctaatgctaagaaaccagatttattagttaataaagtagcgccaccccataaagccatatctaattgacctaaagcatcaataatatcatcgagcttagtaatagtagccttcttttgtgatttaggaagtaagccaatgatctttgaattataggtaacaacattcttacgtgcaatatgttggtttaaccatgattcaatatttgcatttgaatcattgattaaatcattaggcgcaaagaatacatcaccgtagtcgtggatgttgtaactaagttgcttaacagaactatagtcgccttccttaatatctttatcttgccatgcgtaagttgagttattagttgaatcatcaggaatatcatccaattgatccattggggtaatatttgaaaatggttcaatatttctagttccatgatcagtaccaacgttttcaatagttaccaaatcacgtaagtcatcatattgacgcatcaaagtattaatttgagtttgttggtcgtctgggatagtcaaaccagcgttaccatctgaagttgaacttgatgataagttttccatatacttcattggatgtttaagcatatccttgaaaccagaaataacatcctttgatttatcttcagtcttattttcaataggctttgatgctggtttattaaccttttgagcttctacagcatcatcataattttgtttagcaaaattacgagcttgaaccgctttgttataagcttcagctgcctttttcatatcttcagcagaaacggattcgggatctgcttcatagttcttttgcaaagctaccttcttattaaagagatcagtaactttattgcctgcttcaatccaggcattttgtaattcttgtaaattcatgtgttctcttctttctattgccacaataaaagagacaagtcttttttgacttgccccttatctgtatcttcttgtttattttcaatgggtttagagtcagcattggactttttatcatgaattaatgctttaatcttacgaattgcattgtcacttaaaacgggtactccgtaagcattcacaaccgctggtgcttgatcattctcaaacataatagaatcagcaaagcctttatctactgcttgtttagcattcatccaagtagtttcacacatcatacggtaaacttcttgcttatctaaacctgttcgcttgctataaagatcaacataagcttgatccatagaatctagcgattgcattgcactagcaaaatcatccacattgccttcaacaccaccgctaactctatgaatcatcatttgagcagttggcgacatttcaactttgtcagccgctagtgcaatccatgaagcagcagaacaagcttgaccaactacttgagctgttacattacctgggtacttctttaaagcggtatacatttctgagcctgcatcaatgtagccaccaggtgaattaatctctaatgtaatatcttgaccattagcattgctcaaagcctcatttaattgattagggctagtcacttcatatcctagaaatgaataaatatcacctaaattattgggtacgattattcccttgaccggtactgttgtcatcgtcttcacctccttcatttgctggaattattggtttatcgggagttggcaaatcatcaggtaaataaccataatgttgcaaaacataccgtccttgattgcctgacaaaatacccttgcttgataaatcaccaatttcagatgcaaagttatcaccagttgcatcaatagctggtctaatgtcataagtaatttgactatttaatttattagacaattcaccttgaaccgcaccagcatagcgattaagagctttagcatattgcccaccaatttgagtaatattactttgctggtcgccttgaccattaaggtaagaatcaggcacgccatagacctttgcaatttgcttaccagtccaatctgcttgtgaaagtaacttagctacatcactttttacttcaagtggctggtaagtttccaaatcatctaagacaattggtccattatcagaactattaacctgacgcataaactcacgtgatctagctgattttttcttccaatcaagtaaaccaccgccttgaatacttaaaatcccaggtgcttccacagattgagagagagcatgtaatgttaaacgattacttgcattcttgatattcaattcattagctaacccagtaagcggagaaacaccagtcttaccaccgtttttggatacaagcctgatatgaataacatcgctttgcggtacattctcttttggctgaatatcaggctcatcaaaattgatgttatatgttagccctgagccatcttctaaaagcaatgtttggacctgagacggtcttaaaaactcccaatataaatcaacgccattaatatttctccacctgtaggcataagcatttccgtctagcagtaactgtgcaaacattccttgccagaaactaaacccattagtcaaattagaaggattatcaattaagttttgcactctatccttgttagcattgagtttaaccaaagctaaatcagctgataattgtgaaataagtgaaaatatatctgaattttttaaagctgtatctgcagaaacataattgctagcggataaatcatttttaaacaaagtaataaattcaggatcatttaagctataaccagttacattacttttgtttaaattaaaaacaggcattattaatcaccccctccctgtccatgtggaagtagatcaattaataagcccgtcaaaagtaaagcaattcctagacctgcgaagcctgctattttattccataaaaaaagagctataacaataaagccaaagcccaataaataaaggattacatctaagaatttccaaatatctttaaacagtgttttaattatcacccgtttcacctcctaatagaccagaatcaggattttcaaaccactttagcacctgctcttgtgtcattctttcaacttcatgtgacttatcattaatcaagccataattttcaaaattgtacatagcctgatacatggcatctatttcggcgtccacaacatcaattttcttggtagctttatccttatcaacttgaataccaattttatcttctttgattactgcattaagcaaagccatttcttcaattggatcatcaaaccgtgtaattttgccagttgcataagattcttgtaagaacttagttgggttagctaactcacttgtgcgttgcgctatgtcttgaattaaccaccctgtattggcatttaaactttctgtgatgttcttaacctgatagctgccaaaacggtcataaccgaaaaatacgacttctagcctatgtttttgaacaaaatcaagtatccaattgtagacttgttcaggattgatgatgcctttttcatggctagtgatggtgcagtaccctttcttttcaagttcacgataaggaagaccatcttgtttttcttttgcttcaatactccctgcagcttgccatggaataaatgaatgctgcatcatatgccatttgtgaacaccatcagcagtagtataaggaaatgcgaagccaacagctgtattatctgaaaacattgagtagtccaagcccatgtagactcttaagccgtcaatctcaaaactatcatcaacagcgttttcaacatctttaagatttaagtagcttgcggttgactgtttcaaccacagatttaagttcttgttctgaaatttgtggagcgtgttggtaagcatcccttgatcacgttgtttaatcagattttcagttctacgcttacgttctgaatgggataaaccaataagcggatttgatttttcccatgtttcaggcttgaaagtttcatcaaggttatcttgcgcccacaccagacagagagagttatcaccttcacggtcataatctttttccataacatgctgtaatgtaatttgttcctgatgaaatggactggtaggatcaggataagccgaactgatcttgataaattgatggtatggaattacttgtgcttgaccatctgtaatatctgtaattctgtcatatgtattcaacgcaccagtttcatcataaatagccaaaacgttgtgagttgaatcatatttatcagcttcataactgattttccataccttattgttagttctcttttcaatgatttggttagtttgtaaatcaagacctgattcttttgcgagggatgcaaaaggttcaatcttaattactgcttcaagcattttcttgatataaccaaacagctttgtagactgatcagatgtattagcagtaactaaaaagtctttgttggtgtaattcaaagtatcaatcaaaacagctttacacatctgaataccagctatttgtgtcttgccttgaccacgtcctactgaaatatgaatatcagtaaatcttttttcatcattttcgtctttccaaccgttaatcatagcaagaataaacttttgccaattcattaatggtagtggtttatgaaggtcaacatctggaacaattgacgcaaatttaagagtatttctaacttccttcatatcgtaatgatatggaaaatcaggttgaccttgacgctttaaatcttgaagatttctaaaacaagcaagcttagtaatataacctgcaatttgcttaccatccaaaacgtcaaaacagtatttaatggcatcgtcattatatttaagtctgatgtcattccaatcaattgattgataagcaccttccacatcatgagtttgagttagatcaattttcacttcttaaaccacttcctttgagtaaaataaaaagctaaatcacagatttttgtgatttagcctattaattattaacaaaacagccattttgttaataatgatgcaaatttttactgcatttaactagcaaatagcttttttataattttagaatgccgtctttttatataattagctacttctctaatctgattaattggattcaaaacatctaaatcctttcttacccattttccatgaccgtgcttaacgtaaatcatgcgaaaaactcctttaaacttgtaacagttgatttagcatcatcatttttaggtgtattcagttccatcatctgacttctggcttttgggcttaagcccagttctttacctatcgtgttcatctgctttagcgaatcagacataatctgataagctggatttttcttgtatccttgaaagttcttagctgccaccttcccatccacaggagagatgacggttttatagataggttgctgaataccatgttcttgaatatcgtcataagccatgcggtaggtgtcgtaggctgaacagtattgttgaagtaaatattcatcagctcgtaagattttgtcattcttatttagataagtggcaagctttggatacaggtatttgccgtaagttccaagccatttaggtgcttgattaggtacttttggctttgatagatcaactttgttcatgtttcagccccctttcaaaagctttcaaaattttgtttgtggcacaagcgaacggcactgatgcggctccctagacgttaaaaaacggggcgggggtctttttatttttgattcatgtataattacacttacaaaatttaaatctcttagaagcgaatttttagccatttacagcgtgatcatttttcaatctagccgccaagttagcaatcaattttacgtccgttattggcggattatctgttggcttaccatgcaaacccgtgccatagtattgctcttcaaagcgagttttccagtagtggcattcctgacagcatgtaacaagattttgtaagtctttcatgtgatctgggaacctttccactggcagtacgtggtcaattacgttaccttccttaacaatgcctaaagccttacagtaccggcatagactatagtcacgtttaagaactataagtcgcatgtctttccattgcttagaatgataaaacctattctgctctgctttaattggattgcgattgcgaactactttgttgtaatacctttgtctcgttgaattgttatatctatggaatcgataaaaattattacgtttttgcagttctgcttcatgctcaatatgctttttgcaataatgattcggcacataagcaacagcatgacagccgggaaaacggcaacgtctaattcgtggcatcaactcacccccttttggcaaaacaaaaagccgacctaagtcgactcatgtttgcacgctcgctatgtattcataaataatatgcggtaatgtttgattataggtcatcgcatgctatggaacagcatcaattgaattatgacagttaataaacacggctgttcctaaacatagtcacggatttgaaccgtgaccatgcgaagaaaaatctaagattgtttgtcgaatttcattcacttttcgacaatatcaattatgcactaatttccaccgatcgatctccgatgaaagtccgcacagtttccgacgaaagtccgattcatgcatacacacgaagatcaacaagattatcatcatccacatcacattgctgttgatagtagtcatatgcatcagcaaattcaagcagtgaatcaggcttgatacggttatagtactgtgacttttcataaggcaacatcctaataatttgttcttgatcatagcaataaacatagttatctattaatactgtcttatgtaattctgaacaactatagatacttttatatatagcttttattacttgttcaatagataaagcactaactatagatgtttcagcatagttgtgacccgtactatgacttggtgcccatgatagtttaggacttgataaatctattaaatcatgtccgcatcttcgtaataatctaggcaattgtttagatagaaatcgatcaacattgttagcagtagcagaataatttacttcagcaaataaattcaaaataaccaactccatataatagatatatagcaattcgtaatatgtctattatacttcataactaatagctatcgatataccgcttaattgctttagttgcaatcattggcattgattcattcagtctatcggcataatcttttaattcttcataagtatctgcgtcaattgttacttccatacaatcacctcttctattcatatccgtagccaactaaaccattctctacaatctttaatgcatcattagtatttcgtgcaattccatgaataacattgaatttcattagcattttatggaaagctatttgatcaggacgcggtttaccagtagcatttttcacttcaatgtaaaaagcttgatgatcccaatcacgccagccatgcaagtcaggatagccagacggcaagcctgtagtaaaaaatctaccatcaggcgttctaattttaccgacattagcacggaatatatgacaatgatgttgtgagacaactaattcaattttcttttgtatactatgttcactttccattgataaacccttccgtgttgaaaattgcgtctgattcattaggcaatttcatcagtaatttcatgtcatccatacttgcatgttttttctgtaagattaactgtgatgctttaagtgggtagaaatcgcctaaaaagtcatcaccccaaacaccattttttcgataaggaaaaaagtactcattagcgacttcatcataaagtaatgaatctggataaatttttcgtccattcttgtcatgaaaaatagcctttttattatttaacatagttgttgtcctccaggttatgaattctttttgcaagaattacaattgattcccacataaaattatcttgtgcagtagctttatgttgcacagcttcagttaattttttatttgcttgaacttcttccaataaagaatcaaataaatcattacttttatgaatttctttcataagatcgttgttagacttcatggttttataatctgaaaacaaattcagtacacttatcgtagggtaaagaattgcaaataatacaagcagtgcagttttcattacttgtcatccctaactagcattggcttattatccttgttttcttcaggaataagttcctgttgatcagcctcaagacttacttgaactccattgccatcaaaagcaatgtcttttaacttgtttaagttaatcttatgagtaagcaggtctgcatctaattgcaaaactactttattaccattaactttgaaattatttgttgttgcttgaaatttaattgtttttcctgtcatgtttattatctcctgttaactaagcattaaatatgtaaacgatatactggtccaaataaacataagtaaatctaatttttcatttttaaaacaaaaagaaattaagactattaaccagttcattaaaattaatgttaaattgaaatattgttttgctgtcatttataaccaatcagttacttcatattttgcattctcatccaattttcgcccacaattgggacaatacttaataggataaggcaagcctttaatcgttaagtaccacttgtcatccatttcatttagattaacgtgaaatctattcatttttggcgcatataaatccggtccatcgtgaaaagcatttaatgtactgcaaagatagcagctacttgaaactgatgtcattcgtcttcaactcttttcattagttccttcggtggtcgattatatgtaacatgttcacattttgtacaaatataatagtcgctaaggctaaacagcgatgttttatatacataactgtgatgacaaaataattgcttaaaaaatagtttcactctgtaaaataaactaataatcatttatctaatctcctaccacacatagaacaaaatttgatttttttatcaagtttaaaggaaaagtcatcataataatcaataagaaccacttctagtgaattatcttttctgataaataattcacagccatctgtataaaaagttttcatcggatcctctgatccactttcaaaatgacaatatggacagatgctttttttgaaactgcattcatttttaattttcactttctagctttctcccacacataggacaatagttaatcttgctactctttgatacataagtaacttcgacatcacaagataaatttaattcatttccattaatataaacatctccattttcatatctatcaatacctgtgtacccatcttcgtatgtatcttcaattgaaataattgatttttcattattacagtaatcgcacataattattcctccgttaatcagtaatcacaatgtatgcattcactttttcagcgtggttataactattctttaagtccctagccgcttctttaggtgagtcaaataatccttcccaagtttttgcttcattgtcactactactgtgtatagttacaacaatacaacgatcttgttcataataactatcataaaaagtcgagattctaaacagattatattcatctggatcattatcccaacacattaaaatatcgccatacttgtaatcctcattagttttcttcgttcttttatcaattactttcattgccatactcctttatgtactcctgaggcaacataccatattcattaaagaactcaccacatagagcaagatctgatcttacacagtaatctgtagccattatgtgtctagcttcttcaagacccaatttaatatcacgtccgttttcatctttcattttcatgctcctttaatcaatagttatcgttagcaaactatatctagcaatgtccatatctccgcaataagggcaatgtttaatatcatcaatttcagcaataataaattctctgccgcaatgttcacaatggtattcagctaaattatgattgttcattttgatgttctttctttaaattgcgtccacaccagggacaattacctataaagattttgtcagtttcctgagaatagcactcaggatcaggatgagaaataattaaagctggatgatttttacaatcgatgtaagtaaacattattccgtcttcaccattcaccttattaatctcatctggatcaacatagtcatctctgtagtagtcgcgtcctagctttgtctttgggttgatttcacaatatttacacaaatttaaatattctttcctctcaagtgacttccacactgatgaagtgtagtgaattaactgataccgtcacaaaaaatatcagcggtgagtttttgtatagcattgctaatgggtaaataccgatatgacatcttttgccaatttgtcacctatttttcttagcactcaatatagtagactgctaatcgtggtgggttggctaaaaatgtgaccagtttgtggtgagtttgtggtgggtcttacgcctacagcctgtagtgttgtggttagtgttactacttttttctttaaaaagtaaattataaaaaagaaaataaatataataatataggcttttaaactaaccacactaaccgaaacacgtcacacccctacagccccaacggtttgagctaccacatatactcaccacaaccaaccacaactaaccgcaactaatcacagccattaattccaatcaaaatgaagtggttctttctttaattggatgcctacatagcgagttccatttctttctttggttttaggcaatttcttagccatttctctaccaaatttagtcatagacatcaaatgttcattagattctctagcccaatcacgatatgcattgtataaaggtctacccatgatagtgtaattgctaccagctttacagcattcatcaagaaatgcttcaagtggatccatgctttcacggtattgcttggatgcatcttgaacaacttcagggtctttcaagccttctacttgccacatgattgcgccttgaacgatccaatttaagattccagtccattcagcttttaacttgttttccaaattcttatcaactttgttagctggaatttgtacattgaatggaacaaccttaattcttctccaaataccttcatcagttcctctaatgaatggcaagtggttagtagccatccaaatcttgaatttaggatcatattcaaattcttgaccatataaaaatctagctaggattctatctccaccagttaattgcttaactaacgattcatctaaacgtgaaccttcattagcttcagaactggtaactaaacgtgtattttcaagtcgtgcaatatcactattagcacttccgcttgaattgtggacgatgattgactcaactgacatctgctttgcataactaccaagaatatttctgatagtattgataaatacagatttaccgtttctaccagtaccaagtagcaagaaaaatacttgttcagcagtcgatcctgtaattgagtagccaacagctttttggatataatgaatcaatttctcatcatgattgaaaatttgttctaggaagtctttccacataggacaatcaatattgtctgaatattctgatgcggtttgttcactaaacatctttttaatatcatgatctttcaattcaccgctagttaaatcaacataaccagattcagtgtttagaagcatgttgtcatgatcaaatacaccgtgatcaatagttacgtacttcttaaactcctcaatcatgtgtatttttgccatatgggaacgtgattctttaatgaacttattccattctttcattgctttatctttatcctgctgagtagcaaagctgaaatcaggattttcagttttaatcaaattaacaactttttcagctgctaactcaatatgccgtccattatctaattcccaatatgagccattatagaaataccaagttttatcagctgccatatatctgaatacatcaccgaactgatcatttaatctaagtcctcttcctgtatcatcccatgaacgagcaacagcccgttttttaggtttgttccagttaaagactagatctggctctttcccatcttgctcaggattataaatattaacggcttcactgattgctttatttaaaagggatattccataagtagtagcaccacgtttttcatcatatttatctctcattaaactggaattacgaaaaatcgtatccattttgtggaagtctctaccagtccaaaatgcaaggtcattagcaaatgccatatctgcttcagagtgagaattatagaattgttcccagccgcccttcatgaacatggtaaagcgagtaccagtcttagatttttctgcacgttggatgatgtcaggaatagataaatctagcgctgtaatttcaggttcttcaatcttatccggcactgatttatcagcaccaaataagaaattataaagagcttgcatcttttcttttgaaagagtgacaatcttaggaataccaatactgttcccagttagtgcaaagaaacgcccttgttggtacatctcataattgcctttacgtctgcgattgcctggaatctctcccttaaaaatacagtgaatacctgtaccagattggctgacttccatataagtttcatcagtcattaaacggaatttgtttatcagattgctaacagaactatcaccttgatgccaatctgctaaatcatctgaaatatgatcaatatcaagccctacatatccgttagtaaaatagaatgccaagccatcagcacgttcaatttcatctaatgcttttagtgctgtattaaaatctgaccatgtactaggatcattagatttaccagctctaccgttataaggatcaataggaatcttggtatttttattccgctcctttacccatttaagttgaaacaatccccattgctttaaacttcgcaattcttgagggatgttttcataggtaaattttcccatttacttcactccttagaatagaatatcattttcggataattcatctgttgaacctgtattacctttaaatggatcttctacagtttcttgctttttagcagcttgtggtgggaacttagtcttttgccatgaattagtgaaggtactattttgtttgcgagtttcacctttgtaagtattctcacctactgaaatgtagattctaatgaattttccttcacatgctttcatcaaatcttcttttgacttgatgtatttatcaatttgagcttgagttaaaccaattgcatctgcaatatttgccaaatctgctggatcatatgagcctgaatcttgaccggtttctttatccttagcagtccaaacatttgcaaagaagtggcgaccatgtgtttttgcattagtattagctaatgcagaaactttgtctaagtctttacgaactagaaaatcaaattgcatattttcatgaccgctagggcttgcatcaccatggacgcttacaatttgcatttcataagttccctttggaaatagttcacttctgttgtttgtcttttcgtttaaattaataaaacccataattaaataaatcctttccttttagccatgtgccaagcccaaccattcttataatgttttgcctttgcatacatggttaattctttaaaactggttagttcactaacctttttctttgctattagatcaatatggaatttttctgctttaatagctcttaattcttgatctttcttttgtttaatttttctaatttcaattgaaaaatcatgaccgcagatagggcatttcacacattctgctttaataactgcaaaacaatcaggacatgttttaatctgtaatccttcagtactaccgctatctttgcgtggatgtttctcacgatcttccaaagtccacttgtaatcagtatcaggcaaaccaaacctttcaaagttaccaacttgatcaataatgattgcgtgtttgttaggttgatacctcatggctctcattgattgctgtaaataaactacaaggctctctgttggtctgagtaaaacgacacatgaacagtccggcacattaaagccctcagacacaagatctacgttacagaggatttttatttgtccttgcttaaaactatccatgattttatttctctcgttagagggtgttttagcgtccgcatggagggcattaattccagcgtttctaaattcttgtgccacaatcttgctgaagctcgttgagtgacaataaattattgttttacgatctttagcgaacttaagccaagatttaacaatatctccatgaataatgcttttggtaaagtcgtccatcgacttgctggtataatcgccagtactggattttttaagcaagtttttatcgcctagttgatagccatatacagtaaatggtgctagtttgtgatgttcgatcagccatttagttgttgggccttcaatcattgcggaataaatatctttaaatcctttaccagataaacgccatggtgaaccggtaaaaccaagccttggaacatcagaataataattaaatattttctgatatgttttagctcttgagtgttgtgattcatcaacaatgattaaatctggtttggctaaaatatttaatctatttgctactttacctaccgtgagaatggtgcaatggtttaaatcgacaccctgctgtttaaaagaatctttgatctgctttactagttcttggcgatggacaaagaataatacatggccacctttttttactgttaatttagcaatttcactgattactactgacttacctgatcctggagggctaacaattaaaacgccttgatttccagctgctagagcatttctagccttatcaactaagtcttgctgataatcaaataattgaaacatttaatcatcttgcttatgaattttctgcatcatcttgatgatctcattggcatttttggtatgatcattttcttcatcgatttctcgttgaatgtttctgacaagaccagctaacacgacaccatgcccatgatgtatttgaatctggttgccatcatcgtttaaaccgacgataatgaaatgtttagttctgccgttaagaatatccatgcaagttgcacttactttgtcttccatttctttatccaactttaacttttcatttacattttcactaaacattattttttctccttaactttatctactgctttgtctaaatctgatttttgaaacttaaataaatcttcgactttgcagcctctacgctggtcaagcctattttttgcatatgtcccttcatcgccatcaagaattacaccgcgagttccatcatcaggtttcttaatcattcgtcctactacatcggataggcccattaaaacattccgaactgaatctcttagttccggcccatattgattgaattgctggccggaagctgtagttattggatgctctgtttcccatgctgtgatatatacgtttagtggcatgtcataaatccattcgataaatctcaagaagtaattagtccattgagaatagtgttgtaattcattgctaattccattttttgattctcggcctttttcttgaaaccaaattttttcgaaattggaaatatcatctaaaactaaattatcgtatttagttggatcgaatgactctaaccatttgtttagatcttcaattggtttcttagcgtcaatttgccatgccccagctaaatgacctgctaaaactttaaaggacttatcaaaacctaatacataagttttacctggaatgaatttagcagtagatgttttgccaattccttgttttccataaataagcacacgccagtttttcaacttatccaatgtttgaatatttatttcaggcattcattgatacctctttttctaacttttgccatttatatccacctgcataatttctttttcctcttaccacagcggagatatttccttgactaattccagtaatttttgaagcttggtttgcacttgaataggctgcaattctgtggctgtctgaagataactgaataataggagtactaacagcttgaataaatttttgagttctatgaccgtaatttaagttgtgagaatgtgaacaccattctaaatttgaaacatgattatcatctcttatttcatttaaatgatttatttcttggtatccatgaggattatttaaaaatgcttgagcaactaatctgtgaactttgaatatttttcctttaccatttttagaaagtctgaccattaaatagcctttttcgttaggtacttgcttcatcatctttccatagatggttatgtgagaattgccatgcttaacttttctagtcagactacgaatccttccaaaatttgaaacttcgtaaagtgattcaaagtgtttaattggcttccaaacttcttctttccaactaaatgctggcattattcttcacctgcgtcatgaatcaaatttttaataccctgaagctggttaagcacattgttagtaattgctttttcatatgctttaatcattacttgcttaaacatagcccactcattagtatttttgattgcttgaaaggcttgtcttgcttcagacgaatcaaactctgcattttcccatctagcagcaaactttaattgtgcttgttccttgatactatcttctaaccagtctttatcaatcatcgttatctacctctctatccaatccttcattttttactttaatgattgcttcttcgtaaattgatcgcactacattagcgactacttcacttggtgcagcagtaaatttacctggcaattctggcttatttttattaagccaccgcattgcacctgaataagttttgccattctttttagattgatagactaaataaattacccaatcgtctgcatcatcttgcatttttttaatccaatcttgaaagtctttaagatccttattactcatcttgcatgtcctttccgtcatagtagtctaggactaattgcttcatttcgtgattgtcagtgccattttcaaacatccacgcatacatctctgtggttgagtcaaagcccatgtcttctgcagccacttcaggttcttgtacaattgaccaaatgataaaatcacggcaagtatcaaattcttcatgttgaccaattgtgcagcgctcatcaccgtagtaacaaacaatcacatcttgtcccttaagcctttcgtcctctctttgattacgaatgaattgacgttcttttcttagttgtttttctgattttactttcatgtgttatacttcctttgattgttttacttgagaactaccacatcatggctggtagttttctttttgtttaagtcataaatcgtggttactaaatcagtagcagcccacaatttatctttagtttctttactaagttccatttatctctcctttaagaaatccattgaaaaactgcgtcccaaaagccataagacaaaagactcaaggctaaaatcactacaccgataaaaatgtttaaaagcttatcatctaaatcgttcttacgaattggcttgttgaactcacgatagtagtttttgttcatttcatctcatgtcctttcataaaatctgcaagtgtttctttgctaaagagcagttgaccatccacacttaaaggaattaattcatcactgtaattcagtagccaatttctaaaggttgacttgctcacaccgcaatagttagctgcttcagttttattaaagtactgttgttgaattgctctagcgattactctttcaggaattgtgacttgcatacttatacaccttcaatctctagagatagttgagtgggctcagaacttaagagcctattaatgaaatattgctgacctttgcctgtaacttttgtagtaacagtaattcgtgaactgccatctgggttgttaactgttctttctttgactctgaataaaccgagttccatcgctttttgagttggttgattgtatttgagccctttagagcaaagatagtgatgttcacgtagccatttaagcagtctgttttgtcctgtttcataaccgttttgccgtagaatcttagctaattgaccaattaaaatatcatttttacttgtagcaactgcatctgcaaacaaagctttaggcttcatttgcttgttctccagcttcaatctggtgttttcattttgaagaattgcatagccacgtttgacaatctcttgtggattattccacttgcgttcaacttcaattaagtacttgcggtattgcttacctttttcagtacggctcatgagacagagttgttttgccatatcaatagtcaaggcgtagtcatcgtatcttcttaccgttccattgccactttgaacgacgtgacttttaggtgaagtcgtataatccacgttttcttcaaaatctttactattttgtttccaccaatctgtaaacttctttttaagtcctaatccttcatgtaggtcccttgctgaaacaagttgtcgatcattgtgaacttgaactttgattaattcttgcattgttaatgctcctttctatctaagattaaaatcactaatgactgttaagatgaatcgattagctgcaggattagtcttgcgacctgagacgtagtcacgtgcgtcttggtttgaaagcttatacatcttagctaagtcagtaatcttaatatcattatccttaagaaaattttgaaccagctctcggcctggcattgttgatggcatatgatcacttcctttctatatttggtaaactagattcatctcataattaggaggtgaattagatggattcagaattatctaataaagagattgcaaagtcggttgcaattattcgtgtcttggctgaaaagttgaaaagcgataatcctacaagtactcctgcatgggatattaatcgcttcaagtctgaatatcagcgagccatgaatcgtctaaatcaataattcttagaaaaggctatctacttagatggtcttttcttttttactatcttcagcttgaaggctttgtattaaagccttggctaaatattcttgtgcactagctaaaaagcttctggtttcataagaatatttttcgttactgatttcttctaaattctttttcattgcgccgataatagttttcatttatctcaccttctttcatatttatttagtaagataaaaacatagataaaagcttgcattatttattctttggaataaaataatagtgtaagaaataaagcatttaaatagttccccaaccattaaaattgctatgtttctttagttgtttttttctattgatttaacttacaaaaattataataattccaaagaataaaaatgtcaatatttttattcaaaagaattaatttatttttgcaagtgctttttgaggtgcttacataatgatttttgacagaattaaagaattggccaagcaacgccatttttcaaatttgcaggaggtcgcaacagctgcaggattaggtaaaaaccttatttacagttggaaaaagaaaaaaccaaatagtgaaagcttgaaagctgttgctgaggttttgaatactactactgattatttaaacggattaactgataacccaaatcctaataatgattcagaggattcacacactcttacctggcaagacctagacatgccgtacggtggtaaaattcctgacgacttaaaaggaatgtaccgtgccctagctgagcaatatgtaaaagaccatcctgatagtcttaagaaggattaataatgaacgaagtaataacttggttaatgaattactgcatggagcatggtattggcgtggtttatcaaaagaaattgccagaaaccgctccaagcgacagctggcataatcctaaactaataatttttaatgcgaactactataaagttaacgagcggcctttcatgctggcacatgaaatcggtcatgttgtggaagaagttcccgagtattacaaacttgcttatctaggaatggaaaaaggagagttctcagctaatcgttttgcgattaatctgctctccctttactgcatggaaaacgacatttggtatgaaacttactatgattttgctcaagcgttcggcatccctaaagacaaatattacgtacttgagtttgtgtttgaatcaatgaaggagttttgattatgagattaaatcatgattgtgtaagagatgtgatgctatttattgaggaagaacaagaattagaaatggcactccatttacctgattttttaaatcaaaaaaagccagccaaaagccgacttgataaatacgatgctgaaactattaaatatagtttaatgaagttagatgaaacgaattatttaaatgataattgcgtcattactcaatatcaattgattgaatttgatgtcacctcaatcacatggaatggccataagtttttagataccataagagatcctaaaatttggaaaacaacaaaaaatgtagcatcccatttagagagtatctctattacactactttcaaatattgcaagtaatgtcttggaaagctacattcaaaaatttattccaaaagtctaaattcactaccgtcgatgaatatatagatattggtaggcttgtgacccaatcttttagtataaaaatgcattaattctggcgagacataatctattgattgtaaatcttcaccagaaatatgcattgtacttaagaatttattctgaccgtcttcttttgtgaaataaataatacttttcataattgtcacctcattgacattatacctaatcgtccacagtgacgttaaacctgaatagttttcggaggatatagaattttgaataagaagattttatcattattagcagtcggtgcaactctaggtggagttttatcagctcctacctcaacagtttttgcatcccgtaccaagtcagcaaaagttgcaagaaagcacgcgcgtgctaagaaaagagctactcataagaagtttaaagttccttacaaagctttagttggtgctcaaccaactgaagttgtaattactaagagagtcaaaatgtttgaatacaatcctcgactaaaaagaatttacaaacaaaatcttagttcaggcagagttgtaactgctactcaagcaaacaacaatgcttggattattactcacttaggcgctggtgaagtcaacaaaggatctatttgtgtagtcaaaggcaatggctggtttatgactaaagctgaacaagatagacgtttagaaaatgcacgtcgtagattcaatagttcacttgaaaatcaagttggttctcaagaatataacgctatgcgaaatgaattaaatagttatagaaacaatattaagaactgggtagaacattactaatcctaaaaaaacacccgcttaccgctggcacggtaaacgggcagacataaatgtatccggaaaatacaaaatattttgtagacgaatgccgactggcatcggcgttttcgtctaccctattttagcaaaatggaggtaaaaattaaaatgccaaaaagaaaaaatacttcaattaaagagtatgcattaaaatctggtaaaaaacggtttatgttccagatctatttaggatataacagcaatggaaaacctattattactagaagacgtggttttaaatcttatgctgaagctgaagcagcatataacaaaatgtctcagatcaaggcagatgattttgttaaacaaaaacaaattaaagttaatgaattgtttgaactatggtttaaaacttacaaagaaaccgtcaagcctcaaagtgctagtagagtatttgttaattacaagcaccatattaatccctattttggcaataattacatggatagcatcttagtgaaggatctacagaagtgggcagataaattagcaactgaattagttaactatcgtcctgtaatatcaattatgagatcactttatgagtatggtatgcgtttaggctacatatcagataactcaattagtcgaattattacaccaaagaaaaccactcgcaagcgtcgcaatgtggacgataatgtttattctaaagaagagcttgatacatttcttgatgttgctaaacaagtaaatcagtgtgtttatacatactttaaattactagcttctacagggatgagaaaaggtgaagctttggcacttacctggaatgacatcgacttggtcaacaatacaatctctgttaacaagactttaacaagtgttgaccacaaattaatcctttcttctccaaagacaaagaactcaaagcgttctattcccctctcagccaatttaaagcaagtactgctagattatcgcaagagtgagaaaatcgtctcagtcaagctatttcataggttaaacggcaactattggtcattaagtcagccaggagattggcttagagatgtctatgctaaagatcatgcattaaatgttaaatacgctaaagaacataagctagatgattcttatgttagagctaaggacttacgtcacatatctattcatggctttaggcatacctttgccactctcttaattgaaaacaccaatgttaaacctaaaacagttcaaatgttgcttggtcatgcaaatataaaaatgacccttgacatttacactcatattaacaataagaataaagaagacgcaattaactctatttcacaactaaatatttagaataaaaaaagcacctttttagccattttttagccaaaaggtgttttttagtaccctatgtgttgatatatcagtgtttatgcttaattgagtgaaacaatactaacttcattatttctttttcctttttctaggcataaaaaaagacaccatatcaaaggtgtcctttaactagttattgctgttgtcgttgttatttacaacttgacgacccttgtaataaccctttggtgaaacacggtggcttaagcggtattcaccagtagttgcatcatagtgcattgctggaacactcaacttaatgtgaccacgacgtgaacgtttcttttgtttagaagtatgtcttgcaggaactgccatttaatttgatctcctttattgtagtcttaagcttcagggtcatataaccccgaatcactcacgtagttcaatcatactattcaattgctaataaatcaagatttattctattttcttctcttttttattgaagaaagtgaccttgtgatccgttttttccttagtatctcgtccaaagaaccaagcaataatcatcccgataatcaccattaccactaacacaacaattagtggtaacctcaccttaaaaaagccaaaattaattgcgacaggtgatgtatttaaaacaacaaaaattactgcaattaaagccacaactgatccaataattaaatttctttgtttttccatctttttttactttctagaagcaaactttaaggaaatcttatcaccaatcgatggaaatagattatacaatttagccgctacagctaaactaagtggtaaatttaattcacgtttatcactgccaaagaagtgaactacttgccaagcaacatcatctggatccaacaattcttgaacatttttgacataatttccagtcttatctgctacattaaggaaattagtataaactggtcctgggtttacagtcattaccttgacaccaaatggctttaattctagccgtaagacatttgaaaattgaattacggcagccttagatgaactgtaagcggctgacttggtagttggtaccttgccagcaattgagccaaaattaataatttgaccagtcttttgttccatcatgaccctacctactaaacgagtaaagtacatcaaacctaaaacattaacttggaacatattggtaacgtcttgcattttttggtccataaattcttcgaatttaccaaaaccagcacaattaactaaaaagtcaatgtgttttacttgtttagtaattgcattaaaggtttgttcaatttcttccggcttacccatatctgttggaaaaacatatgcttcagcaccggatagttctttagcttctgctgcaatttcatctaattggtcctttcttctagcaattaaaattacagtagcaccacgaccagcactttcaagggcaatggaacgtccaatcccacttgaagcacctgtaattacaacaactttatttcttaatgagtctttcatttttctgagcctttcattggaatattaatctgatcaaaatcattaactaatactgtattagaaaatacttttttagcctgtttttcgagttttttccctttagcacccatataacgagcagaaatatgatttagacataataatttaacattatctttccgagcaattttggctgcttcaaccgaagtagaatgataataatcatgcgccaatttttgttcatcccctgcaaaagttgattcatggactaaaacatctgcatctttagccaaacgagcaatacttggcgtggaacgtgtgtcatagatgaccgtcacaattcttcccggtttagtaggtcctaagaaatttttaccatccaaaacagtaccatcagctaaagttactttttcgccattttttaatttccccaaaagtggcccattaggaacattatactgtgctaacttgtcaattaataattcgcctggatgtgaagcctccactactctaaaaccaaaactaggtatccggtggtctagttgctccgtatacactcgaaagcccttatcctcacagattaaccctgatttagctaattcaacaaaccttatagaatatgaaattttagtccgagataccttaagagctgttctaacaaattcttcaataccactgggaccataaatagtaataggaccaacatcaccttgaaaagaacgagttgacaataaccctggtaacccaaaaatgtgatcaccgtgattatgtgatataaaaattttggtaacttttcgtaatttaatatttgttcttaaaatttgatgctgagttgcttcacctacgtcaaaaagccagatttcattcaattcatccagcaacttaagtgcaacactagaaacattgcgttgctttgaaggttgcccagcaccagtacctaaaaattgtaattccatgaaaatcctattctaatctaaaattttgaatgcttaacaattgttttggtaactaatgcactatagtattttgagccctttaaattagggtgagtatgatcaccgtagaaccagtcaggatgattcttcgagtatgaataccaatcaattattataagattatgataccgttttgcaccttgatttagcaaattattcactgaattttgccaatctctagttggaacgtgaacattaatccagaaaacttttctcttaggtccagcctgatgcattattcgatcaagatcttccattgagaaaggtccattagttcctaaccctattaagatattatctgctaaaactccttgactttgataactatctaataagccaaaagcaacattcaattgtcttgaaacagcagcatcaattaacgctttaggcattaatcgttttaaatcgttgctcgaaccggccattaccgagtcgccaatcgcagttacttgaacatgttgagccaattgcaaatctaactgggaaataccatatttaacaaaggatttgttaataggatgctttttagtttgaagctcagcttcacgaataattttagattttttttcttttttctttttttctttttttaacttttcaattaatttagcattatccgttttttgttttttagaattctgattaattcgctgtgctaattggcttttattaaagtcttctgcttttactcctggtgaaatagcaatagctgctgatcctaagattaaaatcaaagctgctaaggctgcttgacctttcttaaagtaatcttttgtttcaaaattaaaaattcgagcaaaatattgcttcgttttatcccaggtaatcctacccattggtctttcaatcaaacgataagtaatttctgtaatcactaaaattaaaatcacttcaataaggtgatacagcattggattatcaccaatatttaccttatcttcaaaaaagatcattactggaaattgatacagatagatgccataacttcgcgatccaatccaatcaaataacctattagttaggatttgattccaatgactaccaggatgagcaattaccgctactaaaatacatacatctaaagtaaataacaacatcccgccagagtaagtaaaggcttgttgtggattcatccacttagagaaaaacattgctaacattaaagcaaatgaagcaaggcccaccaagtccagtatccagcctacttttcgttcaacttgctgatttaaactctctatcggccaaacaactgctaatgctgctcctaatcctaaagaaaagaaacgagtatcagttccataataaattcgattaatatcagcctttaaaaagtataggattgccatttctaatgcagaaacagctgatagaccaactaaaatccagaaaatattttttttctttttaaccaatttaactagtaaataaatgacaattggccaaacaatataaaattggccttcaattgacatcgtccataaattagtaaatggtgattcattagctgcaaaacgctcaaaatagctttgaccattatgaatttgccaaaaattaaatacatttaatagatttgcaagtacaacctgatttaatttagccagtaaatttcgttgaaagataaagatataggctgcacttaaccataaaacagtaattaattgtggatataacttttttattcgactcaaataaaaatgacgattattatatgatcctgttttatcatatgaattaaacatatgatctgtcaccaaatatcctgagagcacgaaaaaaatcggcactcccagatatcctcccataaaggaattaggatccaaatgataaagaattactccgataactgctaaggctctaaggccagaataccccgtaataaacctattttttttcataccctatctctactcttattgtacgaattcaaagacaaacttgccaatagccacatcatcaccattaacagctcctttttcacgtagtgcgtcatcaacacctaaacgcttaagctttcttgctaaacgcataataccgtcttggtgatccaagttggtcatttgaactaatctttctaattgttcacccttaacgataaattcatgttcgccaacttgctcaactgtaaattcattcttttgtggtgcctgatacttatattctttaatcttttgtgctagcttaggttgttcttcagcctgttcttgttcaacttcagttactaagttggcagtatctgacatcaacttatctacgcctttatgagttacacttgagatctcataaataggttcattatttccttctgcttttaatgcttttttaaactcagctagtttttcctcagcaccaggaatatccatttgtgaagctacaatcaattctcgcttctttgataaatctgtttcgtaatttttgagttcttttttaatggtatggtaatcatcaattgcctcacgaccattattaggatccattgaaactagatgtagaattactttggttctttcaacgtgacgtaaaaattgaattcccaagcctacgccttgactagctccttcaattaatcctggcaaatccgccattgaaaagtcacgaccatctggcaagataaccattcccaaattaggagttaaagtcgtgaattgataagcagcaattttgggcttggccttagttgttactgataacagtgttgatttaccaactgacggaaaaccaactaagccgacatcagccaataattttaattctaagcgcaaaacgcgatcttcacctggttcaccattttcagcaatttctggtgcagtattaacactagttgcaaaatggatattaccgcgaccgccgcgaccacctttagcaacgactagttcttgacccttttcagttaaatcaccaatcaattcattagtgtcataatcatatacagtagtaccaactggaacttttaaataaagatccttagctgcacggccatattgtgatttaatacgaccattttcaccactatccgccttaaacttacgccgatagcgaaaatccatcaaagttcttaagccgctgtcagcaacaaaaataatactgccgccacggccaccatcaccaccggctggaccgccattagggacgtatttttcatggcggaaagccaccatgccatcgccgccttttccggcttgtacttcgattttagtttgatcaacaaatgtaggcatgtatatctcttccttccgtcttaatctagcttttaatactataccacagaaatacgcatgatatcgcgttttctcggattacaatgttaattttaccgtttgtgcttgagtaagcgttaatcctgctctacgcaagtcatcaattgaagcttctttaattttcttcaatgaaccaaattcgcgcaataatttgttacgacttttaggaccaattcccttaatcgaatctaaacgactggacaaagcatttttagcatggcgtcttctatgaaaagtaatcgcaaagcggtgcacttcgtcttgaacgcgcgtcattaaataaaagccctctgatttgggattaaggggaatcagtttcaaaggaataccgttgatgggatcgccaaataataaatggtttgttctgtgcttatcatctttaaccatccccgcaactgggatattcaaatttaattcatttcgtaaaacatctaaacaagcatcgacctgaatttgaccaccatccatcaaaatcaaatcaggcattcttttatgctcgcgcaacagtctaccatatcttcggcggacaacttccctcgtgttgcgtacttcgtcgccaccattttgatgttcaacctcaccttttagcttatatttacgataagctgttttttcgggttcaccatctttaaaaacgactaaagcagagactgggtcagcaccttgaatatgggagtgatcaaaactttcaataaagtgtccatatggtaagcctaaagcatcaaaaatttctttttgagcgcctttagtttttcgattacctagttctaataatctaaacttatcatctagctttaacttagcattatccttcgccatgtctagcaatgactttttctgccctcgttgcggtgttctaacaggtaccttcaaaacctcagctaaagtagcattatcaaatccttcaggaatcagaatttctttgggcaaaaccctatttctttgcccataaaattgcacaataaaggaagtgaaagcatcttctggatctgtggcatctgtcaaaggaaacattctggtttctctacgcaataactttgcttgccgtaaaaagaagatttgaacagaaatccaagacttgtcaacgtaataattaaaaatatcacgctgcgtattatcattggaaataattttttgtttttcaaccgtttcttcaatatatttcaattggtcgcgaatttcggctgctcgttcaaattcaagattgctagctgcttgagccattttttcggtcaaactctgcttaacactagcaatatctccattcaaaaagctcttgatctttttaatttgctcttcgtattctttttgtggcacttttttaaagcatgcacctaagcactgccccatatgatagtaaagacaaggtctgccttgataaccatgacagcgccttagtggaaaaactttttgaataaacttcaaagtggcctgggcagcatatacattaggatagggaccaaaatagtagccaccatccttatgaacgatactagttaaccgagtttgcggatcatgttcacgcgtgatttctatgtaaggatatcccgtaccctgctttaattgaacattataataaggttgatacttttttattaatgtaatttcaagtaaaaaagcttccttatcagttgatacagtaatgatgtcataatctcgaatttcacgaactaattcagcacgacgtccaacctgtttactcttaaaatatgagcgaacccgattttttaaatttttagatttaccaacatatataaccgtaccgttaatatctttcatcaaataacagccgggtttttctggtaaaagttttagtttattctcaattaattgtgttgccattatctcatctcactgaaaaaatttgcatttaatagtttaacacagactgtttaagaagatcttaactttgcttatagaaatagctattcggtacaaaagttgatatattaaaagaaataaaatttgaggagaacttttgatgactaatctagtttttgacttaattaaccaatttggctacctagccatcagtttgctaattgcaatcgaaaacatctttccccctattccatccgaagtaattctatcgttcgctggctttgcaacccatcattctcaaatgaatgtcttcggtgtaattattgcttcaacaatcggcgcggtagttggtgcactagttttatattggattggcactttacttaatccagatcgattagaaaagttgttcgatcataagttattcaaactacttggctttaaaaagggtgatgtacaaaaggctatcagatggtttgataaatacggtaccggtgcaatcttctatggtcgctgcatccctgtagttcgtagcttaatttcaattccagctggaatagccaaagttaaattacctaatttccttatttacactagcttaggcagcttactctggaatgctattctagttggtcttggttcctatatgggtgaaaattgggaacaaattgtgttaatttttgaagaatactcattaattattggaggacttattctaattgctttaatatatttttcctgtaaatggtataagcaaaaaattaaagctgattaattcaaacgctctataaaaaatatagagcgttttcttcttttaaaaattaaaaatatcatgtaaaattaatctaatctataataagggaagtttgcgaatgaaatttaatatttttaggaaacaaaatgttgagaactatctcggtaaagacattaagttctccaaaacaatgaacgccgttgatttaatgtctcttggcgtaggagctgtcatcgggaccggtattttcatcttacccggaactgttgcagccacattaactggacctggcgttagtttatcctttgttgttgcagcaattgtttgtgctttagctggaatgtgttatgcagaatttgcttcagcgatcccagtagctggttctgcctattcatatgggaatatcgtttatggcgaatttacaggctggattatcggttgggcactgattttggaatacatgctatctgtagccactgtggcagcaggttggtcatcatacttcagttctttcattgcaccatttggtctaaaaattccacacgctatttctggtcctatgaatcttaacaatggcgtttattttgacttggtttctgttttaatcattttacttatcagtatcctgttgtcacgagggatgaagaactcaattaaaattaatgtcgtagctgtttttattaaaatcgccattattttaatttttatttttgtaggcttacagttcattaaacctaacaactatcatccgttcttgccatatcatttttcaggagtcatcaaaggagcaaccacagtcttctttgcctttcttggctttgatgttgtttcatcatcagccgccgaggttaaaaatcctaagaaaaatatgcccctaggaattattggcactttagctattgcagctgtactttattttggcgtttcaatcgttttaacgggtatggttaattataccaagctaaacgtatctaatcccgttgcttttgcattgcaatatgttcatcaaaactgggtagcagagttattatcatttggtgctatgctaggaatggctaccatgatgctgacaatgatctattcaagctctcgcttaatctatgctatggcacgtgatgggctattgcctagtgcattcagtaaattagataaaaaacataactctcctcaaaatgccttagtcgctgtcactattattattgcagcaggtgcagcattcttctccgttgatcaactagccaatttggtcaactttggtacactttttgcctttactcttgtttcctttggaattctaaaattaagaaaaagaacagatattgttaacgatggctttaaagttcccggatacccatatttgccaatcatttctggtttaatttgtatctttatgatttgccatttaagttcagaagtttacttaatggcagctatttggttaatcatcggtgctgtaatttactttatttatggctaccaccatagtcagcttgatcatgattaacatcagtaaaaattatgtaaagaaaaagacgattcgcatgaatcgtcttttttagctctgtttgaactagttaatttgattaattgcctgaccatctttaaagaaagacaaaacattattcgcagcttctttagacaaattaaatctagcaatgtgagtagctgaaccaacgtgaggcgtcatgatcacattatccatttcaaccaattcaggtcttggatgcggttcgttttcgaaaacatctaaggcggcgcctgcaattgaaccattctttaacgcagcaattaatgcatccccgtcaatcaacgatccacgagcaacattaattaaaaacgctgtgtctttcattttctttaaaaagtctgaattaaccagatgatatgtttcagctgtagcaggagtatgtaaactcacaaaatcagcttcttttgccaaagtatctaagtcaacatatttagcatctaattctgctgcaatttgatcatctacttgatgacgattatgataaataattgtcataccaaatgctttagcgaacctagcaacttgttgaccaattcgacccatacctacaattcctaaggtctttccttcaatggagtacccttggttgtcgtactcatcggcatttaaaaagacgccttcacgcaaagcatcgtcataataatgcaatctacgagctgatgccataatcattgtccaggcaagttccgccattggacgcaacacactcttagggcaatttgaaacaactattcctttttctttagcgtattcaacatcaacgtgatcaaagccaacgccataagttgaaattatttttaaatttttcgcagcatcaatcatttctcgatcaaaagccatctttgctacgatcacaccatcatattctgcaatatgatcaagcacccactcacgatcatcttctggtcgatgtcctactggaccgatatcaacttgacaaatattttttaaatcagttaaggcctcatctcttaagccacctaaaactaaaacttttgctttattcattatttttagacctctattcaattttcatcttaaagtaaaaataccactatttgaaagagaaaacatctactttaatacgcgtggtgctagttaaatcgttttagttaataaaaaagtccaattagactagactcaagttgtaagtaatttaaatagaaaagagtctgatctaattgaactatctcaagcttaagcgtttttctcaccatttacaagttagttttaatcggttaaatgtgatttgtcgctcgctgtataagctttatgcgcctgatggacttaaacatcgtaaaaatgttgatcagaccaagcttcctgatagttctatcttagcgatgctcatttggcaaactgaaattggaattgaatctcaacgaagattctgtaaattcttcgttggcttatctcattctcgttttaaccgtcgagctcgaatgctcttgcctctaattcgttgtatccgtcagggttggaatcaggaagtaaaggtaggtggagaattattgattatcgacagttttccgattccagtttgtcagcctgttcgcaattatcacgttaagatcttccgtggcatagccgatattggttataaagcgacgaaaaaaatctactattatggcttcaaagtccacgcaatagtgagtgatgatggctatctgcttgactacgcagttactaaggcgtcggtacatgatgcaaaagagacggtagaattgatgatcaatgctcatccaattaaccattatcttttaggagatgaaggctatttaggaaaagacttagcagccaagctaaagcgtatgggatacgtgctttggacaccatatcgtaaaaacatgaggggtgctaaaaagcataatgatcatcagttaatggcaattagaagaacaatcgaaagcgacttttctttgcttagctattacaatgctgagaataatcgagccaggagcttagtaggttttcaacaacggctagaaatagctattttagcttataatatggcatattgtctagaacgatttaactagcaccacgcgtactttaatattttattgattgcaactgcaacaccgtcgtggtcacaatcagccgtaacttcgtcagcatgttgctttgtatattcaacagcatttcccattgcgatacctaatccagcataagttaacatcggcatgtcgtttgcttgatcgcctagggccatcacattacttcgatctatttttaagtagtcacatagtcttttcaggccagtccccttatcgacaccggcagcggttgcttcataataaaaaggctcagtctttgaaaatacaactcgatctttcatcatttcaaataaaggagattctattttatcatctaaatagtctggatcatcaacatacatacatttgatgattggtatctgcttcatttcttcttgtgtacgatatgagacttctaattttacgacccgtgaattataaattgtataatgtcccaaatcacggctagctgtataaattcgatctaacgatacgctatgaaaatgtaagtttagctttcgcgcaattgtctctaaatctacataatcttcatattttagcccctgtttgaaaataacctgccccgcggttgattctacaactgcaccattaaaactaactacatactgattttcttggccattaagccctaattcatctaaataacgttgagtatctgacaaaggccgacctgtgcaaattacgatttgcttgccttgtttttgagcagtcaaaattgcttttttaactgctggtgtaatctccttcttagaattaactaaggttccatcaatatctatcgcgattagcttaatttcttccattaccttttcccttaaaacaaagaaagcaccgcttatgcgatgctcctattaaacagccatggtctgcgtattttcttttaacttgaccaaatcagccatatcatcagcactgatttcaaaatcgatgttcaagttttcctgcatttctttaacattatcactcttcggcaaaacaatacaacctagctgtaagtcaaatgctaacattaattgagctggactaacatgatacttttcagcgtaagtcctgattcttggatcctttaacaaacgaccatgtgcaagtggagaatatgctttaatctgaattcctaaatttttacattatttcatcaaatcagttggcacatttcctatatgaacttcgatttgattaactactggcttaattgagctgttattaacaatgttagctacgtcttcttgtaaaaaatttgaaacaccaattgatctaactttaccggctttaagtgcttcttccattgctctccagttttccagattgccttcaaagtgacgatcattaattctattcacttcaatccaaggttgtggtgaatgaattaacaacatatcaatatattccaaactaaatcgatctaaagcgtcatcaattgcttttttgtaccttcatagtctttaatcgaagttggtaatttagttgttaaaaaatatcactactctcaacatcagagttccaaataccttttcccacaccactttcattgccatagtctttagcagtgtcgaaagcgcggtaaccaacattaatcgcttgacgaattacttttcgtacatcatcgttattaattagccaagttcctagttgaattcgaggaacctctactccgttattgagcattaaagttttatcagagtacatatatacacctctacattttactaatatgtctctgtttcttaattcctgtatttgtatagctaataacaattattaaacaataattgtttttttcagccatctgttaatagagtacaacaaaattgttgcaaatcctatacatacattttattttttgtgattctgttatattttctaattaaaatagtagcatcaatcaatgctgctgggtttataaagattatcaaataatttattttattattctatacaaaattaatattttcgtataaaaaaagaaagggctgatgatgtcctatcaactctttctcttcagtctcttaattcccaacacctataataccagcatttatcatttaaacaaggataaaaaacatcttttacttacttttagttttcacattatagttttcatcacatgtttaaaaagcttagatgctatattacaaaatgattacaagagaaatatagatcatatagttcactattagctatatgcaaatactatattttttgagcaataagctgcaacaatttttgagcaatctttcgcttactcattttaggccatttcttagttgacttatttttttgtaaaatcgttacctggtcttcatcattgccaaaaacatttttagaaacgtcatttgctacaatcatatctgcaccttttgaagatagcttttttgcagcattttgtagcaaattattcgtttctgccgcaaagccgacaactatctgccctcgctgcttgtggctagcaacttcgcgtaaaatatctgtcgttttaactaaagttagagtcaaagtttgttgatcagcttgcttttttaatttatgatctgcaacttgtttcatgcgccaatccgctactgcagcagccataattaaaacgttactatgcttaaattcttttttgactgcaactaacatttcttcgctactagaaacatgaattaatgtaatcctaggattttgtggcaaaggcatacttacattaccatatattagctttacttttgctcccatcgctgctgcttctgtagctaaggaaatgcccattttcccactagagcggttaccaataaagcggacgggatcgattgcttcttcagtaccaccagcagtaataacaatattttttccttgcaaaacgttctgttgttcagtgaaatttttgatccacgccacaattgctcctggctctggcattcgtcctttagcagcatagccttctgccagcatccctactgcaggctccattatttctacaccatgttctttcagaaaagctatatttcgctgtgtagctggattattccacatttggtcattcatggctggtacaaccaatttaggtgcacttgtagctaaaattgtagtgctagctgcatcgtcagcaattcccgttgccattttagcaataaaatttgcagtcgctggtaaaaccagagctaactctgtccaacgcgctagatgaacatgtggtatgctagactgattttccttgctccataaatcatccaaaacaggatactttgttaaagcagccagtgtattagtagttacaaaatgctctgcatttttagtcattactatttgaacttgatgacccgctttttctaaatcgcggataacgttaactgccttataatcagcgattccacctgtcatataaattgttattcgactcattttaccattcctcgtcatctaaacttatttttattttatcattgtccacttaaatagtagaatattgtgttgggagttatatttggaggaaaaattgaaaaatatgcaaaaactacttttactaactatattcttacttagcttatcggcctgcactaaaccacaattatcctctgtaccacgtgataaaagtgccactacaatcaagattgttgataggaagcttgagttgcatcagcccactaaaaggccacttcaacctttaaatggaattttgcctcattggctgcaaatgccagataaatctctgcctaagccagcaatttatactaatttgaatactgttcttaaaaacaaatagggaaatgattagtttcatcttccctattttttgttcaatttacaagttgctttaaaaatagttgttttatattaatgagtaatttaaaatttatataatacagaaaggaactttatatatgccaaatttatccagtgatttaacttcaactattaatgagagactaaacaacttgaccgcatctaaaattcgagcatttgaccaaaaggtctctgaaatttctgggattattaagttaactattggtgaacctgatttagcaacacctgatcatattaaagatgccgcaattcgtgatattcaggctaatgattcccattatgctcctcaagctggtaagccagaactacttgaagctattagcaattaccttgaccgctcaattggtgtacattatgatccaaaaagtgaaatctgtgtcactgtcggtgcaacaggtgcattaaatgatgtctttatgaccttgcttaaccccggtgacaaaattttggttcctactccggtttgggctttatactttcagctaattaaaatgactggagcaatccctattcaagtcgatactaaaaaagatgacttcatcttaacagctgaacatttacgtcatgttctcaatggtcgcggtaaaggtgcaaaggcaattattttaactgatccttctaatccaactggccgcgtttattctgccacagctctaaaaaccttagcagatgtcattaaggaatacaaaatcttttctgtaactgatgaaatttatgcagaacttgtttatggcaaagccaaacatcactcactttctgaatacatccctgacagaaatattttgatttccggtttatccaaggcttatgctatgactggctggcgtttaggctatattgctgcccctaaacaaattatgaagagcatccgcaagattaattcatttttagttacttcagttactgataacgttcaaatagctgctgtcgaagccttaaacaatggtcaaaacgatcctaaaaaagcacgcgaaatctacgaagcacgtttaaactttatgcaatctggcttagaaaagttgggctttgaaatggccacaccgcaaggagcattctacatttttgctaagatccccgaaaaatatggcaccaatgatgagcaattcgcttttgagctggctcaaaaagcaaaagtcggtgtcactcctggtcgctactttggcaagggcggtgaaggttatgtccgtctttcttatgcatcatcaactgagcaattaaaagaaagtttagctcggattagtgatttcgttaataatttataattcagataaaaaaataagtgatctcaatcaaagcgagatcacttattttttattatattgatttattacttatcccaagttgaattttctgcagcatcttcagcagccatcttttcaagacgctcttcagttgcctttacactgtcttggtacttttcctcaacttcgatccccaagtcagctaattgttgatcagctactggagctggagcatgcatcattggttctgaagcagaagcattcttagggaatgctgaaacgtcacgaatattatccttatcagcaagcatcattgcaaatcgatcaagaccgatagctaaacctgcgtgaggtgggaagcccatgtccaaagcatccatcaagtaaccaaattgttcatatgcacgtttcttagtgaaaccaagtgccttaaacatattttcttgaattgagcgcttgtggatacggattgagccaccgcccatctcatcaccattcataacaatatcataactacgtgcgtgagccttatgaggttcagtagttagcaacttaaccccttcatcatctggcatagtgaatgggtggtgagctgctacccaacggccaagtccttcatcgtattcaaataatggccaatcaacaacccaaacaaagtcataaacacccttaggaataataccagtttctttggcaaattcacgacgaaggtggtcaagtgaatcacaacataccttccacttatcagctacgaatactactaattcgccaccttcaagatcaaattccttcttcaaagcttctttgttctcatcagtcaagaagcgagcaacagggcctgaaaattcgccatcttcaaatttaacccaagccaaacctttagcgtggaatcgtttaataaagtcagccttcttgtcaatcttcttacgtgagtattcttttgcaccatttttaacagcaattcccttaacaaaaccgccatcagcaattgcaccggagaagaccttaaagtcactatccttgaaaattgggcttaagtcatgaatcaacataccgtaacgagtatctggtttgtcacagccatacttgttcattgaatcagtccaagtaattcgcttaattggagttttaagatcaatgcccttgacatctttcataattttcttcaaaagaccttcagtataactctgaatagtttcttcatcagcaaatgacatttccatatcaatttgagtaaattctggttggcggtcaccacgtaggtcttcatcacggaaacaacgagctaactggtaatacttgtcaaatcctgcacccattaaaagctgcttgaacagttgtggtgattgtggcaaagcgtagaaactacctggatagattcttgatggtactaagtagtcacgtgcaccttcaggtgatgacttacctaagattggagtttcaatatcaataaaaccattttcatcaaagaattcatgagtagcacgcaaaatctttgaacgtaaaataattgcttgttgaacttctggacggcgaagatcaagatagcgatactttaatctagtttgttctgagacttcaattccatctttaatttcaaatggagggttcttagccttgtttaaaataatgatttcagttgcatcaacttcaacttgaccagtcttcatgtcagggttaacttctgaacgcttaacaactttccccttaacttgaacaacatattcattaccaagtgaatcggcaatatccattaacttcttaccagaatctttgttaacaacgatctgaaccaagccttcacggtcacgcaaatcgatgaaaaccaagttacctaagttacgtacacgttgtacccaaccatagagatttacatcttgaccgatgtatttttcagtaatattgccacaataatctgttcttttttcgatcttttccattgttactagtccttcaattcatccattattttagtcatgttatttagatcttcaagacttaaatcgattgtcttgccatcagctaaacgtttaatattcaaaacgccgttagccagttccttttcacctaaagtaataacatacttagcaccttcacgatctgccttcttgaattggttctttaacttcttctgattgacatcaaagtcagcttcaaaaccttgattacgaaggctacgtgcaatttcaattgccttttgtgcagtaccgtcaccaatattagtaataaagaaatcaataccgcgtttctcgaataatgcaggattttgctttttaagcaccaacatcaatctttcttcgccaatcccgaaaccaacggctggagtagcgggtccattgaattcttctaccaagtgatcatatctaccaccaccaagaatagtagttgcactttcccataagctcttatcttcaaccataaattcaaagataattccagtatagtaatcaagtccacgtactagatcatcatcaattacataatcaataccaagttgatctagcatcttcaagattgcttcaaaattagcttttgaatcgtcatccaaaaattcacgaatcttaggtgccttaggcaagaacttcttatcacgttcatctttagaatctaaaatacgcaatggattatcacgcaatcttctttgtgagtcttctgataactcatctttcaaaggagtgaaataattaaccaaagcatcatgataatcttgacgtacttgctcattccccaaagtgttaatgtgaagttggtaattcttaacgcctaactcacccaataaatcatgtcccatcatgattgtttgtacatcacttaatgggttgcttgagccaaagctctctaccccaatttggtgaaattcacgttgacgaccggcttgtggtctttcatatctaaaagttgattccatataaaaaacattaaatggcttaacaacttctggcgcatacatcttgtcttctacataagcccgcactacgctagctgttccttctgggcgaagggcaatatggcgaccacccttatcatcgaagtcgtacatctgtttttcaacgatttctgaactatcgccacttgaacgagcaaagatttcataattttcaaaacttggtgtgcgaatttcacgataatttgcgcgattgaagaaatttctggcagtttcttcaactttttgccatgaaccagattgatcaggcaaaatatcaactgttcccttaggtttttgaactctcatttaatcatcctttttatattttgataacttgattaaaaataaaaagcgcccttgaacttaatcaagggcgcttagattagcacggtaccacctttttggttgctgcgattaacgctcgccaaacgatccattatctgttaaaggtgtcacagaccgcgatctatctactctctcaccacaacgagcagtctctttgaatagatcattgctaatctacattctttgtcatcgataattcttacttagcttatatttttctcaagacattgtcaacctttgcggtctcattttttcgctaaagatctaacacaatcgtgaatggaccatcgttttctaaactaacttgcatgtcagccccaaactcaccagtctcaacgtggaaaccgtcattttctagttcttgattaaagtcttcccaaagttctttcgatcttggtggacgcatcgcatcaacaaaactaggacggttgccttttttagtatttgccatcaacgtaaattgtgataccgacaaaatttctccgttaacatcctttaaagacaagttagtcttcccctcctcatcttcaaaaatacgcattttagctattttatcagctgcttttttgattactggcaattcatcaccatttttgatgccaactaataataaaaagcctttaccaatcttgcccacagttttaccgtcaatatctacttgagcatgatttactctctgaattacaactcgcattaattatctgacctcttagtttcgtatacgtctggaatatcacgtaatttactcaaaatttcatctagttgatctgcattccgtacagcaactgtgacatacatatgtgcaacattatcttcgtttactttaccagaaatattattaatattcttagtaagtgaattcaacttattaataacgtcactaagcagattggaacgattgtaaccaaagacttcaatatttgcattaaaggattgaacactattttcctcaacattttcccattcaacatcaattaagcgaccttgttcttcagcttctttggtgatattacggcaatctgttcggtgaatagttacaccgcgacctttagttacatacccaataatcttgtcacctggaactggattacaacacttagctaaatgaagcattaagtcactaacgccttggatcatgacgccatttttatgcttaaccttcattgtagtatttgaattcttcttaggttgttcttcttgaactgcttgttgtccagaattcaaaatcttttcttccagctctttttgtttttgattttcttcctcacggcgcaaatcaaccgtcaagcgattaaccactgcttgagcagaaagatcaccaaagcctactgccgcatatagttcatctgcagtgtgataattaaagtgctctaatagcttttcaattcgatccctggccataaattctttgggtgaaagatcctcatcgcgcaacatatcagcaatcaattgttcaccatgctggatgctatcttctctatcctgacttctgaagtagcgtctaatcttgttgcgtgctcttgaagtcttcaccatgtcaacccagtcacgcgatggcgctgcattagtctgtgtcataatttcaataacatcgccattgcgtaatttatagtccaaaggaactaatttgttattaactttggcacctactgcatgactaccaacttgagtgtgaattgcataggcaaaatctagcgtaaccgaacctttaggtagttcatatacttcacctttaggcgtaaaaacataaactctgtctgaaaaaatatcacttttaacagacttcataaattcaccggcatctttagtttcatcctttaattcaaggatttctcttaccatatccagcttttcaccagaggtactttgctcaacaccagtaaaattgccacgcttataagcccagtgtgcagccacaccatattcagctactttatgcatttgttcagttctaatctgaatttctagtggacgaccgccaggcccaataatggttgtatggagtgattgatagccgttaacctttggcatagcaatgtaatccttaaaacgacctggcattggcttccattcagtatgaacagcacccaaaacagcataacaatcacgcacatttttaacaattacacgtacagccaataagtcataaatctcatcaaaatctttatgcttattaaccatctttttatagattgaataaatatgcttcggacgaccataaatttcatatttaatgcctaattcatttagagtcttcttcaaagtcttgattgtatcggcaatatatttttcacgctggcttcgcttgacatccatcaagttaacaatgcggtaataggcttcgggatttaagtagtggaaagacatatcttctagttcccacttaattgtcccaatacctagacgatcagccagcggtgcataaatatccattgtttcggaagcaatacgccgctgcttatcaggtcgtaagtgttgcagagtatgcatattgtgtaaacggtcggctaacttcaccataattacacgtagatcttgagccatggcaatcaacattttacggtgattctcagctaaaaattcttgatgagacttgtactcatatttgtttaacttggttacaccatcaacaataaaagctacatcttcaccaaatttttccttcagctcatcatttgtaactggggtatcttccactgtatcgtgcaaaaagcccgctgcaactgtatcaggatctaagcctaatgtagctaaagttccagccacttgcgttggatgaataatataaggttgtccagacgcccgtttctgtccagcatgagctttattggcaaattcatatgctttttcaacaaaggccacctggtcatcattcatatactttttgcaggtatcaattacctgatcatgcgtcatttcaatgtatttggacattatgatcatcccctctagcggtaaatatttttattcattaagccaaaagcttcaattattaagtaaattaaaccaaacattaaattatacaaagcaaaatgtggcaacattgctaagcagaaaagcacaggtaacaagaaaattcaccacttggacaggttaagtttaataattaaattgcctagatggtatgcaatgatgctgttaataataaaaaacagaattgcttctcgccacactaccggcacacggcaaatgctaaagatatacggcaaaatcattaccaaaatactccaccagacaagtgacatccagcgatgagaattcaacttcctgacaattggaattgcttcgattttatttcctagttttttcattaaaagattgtgcctctcatcaaagtttaatttaattgataatattttaccatatttatttttcttttctagtaattgctagtcccatccagcgaccttgacgcatggttaaatcgaccttaaagccattctcgtctagagccttttcaatcttaggcaattgcaggtagtcaattccagaaaagataacttgaccatcgtcgtttaaatgactatccatttgtggaatcaagtctagtaaaatttctgccaaaatattggcaacaatgatgtcaaacttgcctttaacatcagctaacaaactagtcttttgagtgtgaatattattaatatcgtttaaggctgcattttgtttagctgcagtcattgattcatctgaaatatctgtggctaaaacatcagttgctcctaattttgatgcagcaattgccaaaataccggaccctgtaccaacgtccactacattcattggcttaaccattgctctctctaggcccatcattgctaattgagtagttttgtgatttcctgtaccaaaagctaagcctggatcaagcttaattaattgctggtccttaaaagcgggtttgtaatcttcccattcaggcacaattgccaagtgacgtgaaaaatcaatcacgtgataatacttttgccatgccgtgttccaatcttggtccttaatgtatgaagttgtaattttggcatcccctacatctaggccatagctcttcaattcctttaacttatcttggaatttttttactaatgcgtctttatctgcttcttcatcaaaataagcatagaaatatgtatccttaggtaagtctttaatgtcatccatttcaactacagtagaatcatgcaaccagcctgcttgctcaaagtcgctacgctttcttgattcaatacccaatgcattcagattatctaaagcaaaaacgctcaaagcgtcttcaacttcatgactagtatcaattttaataattagtaatttcattagtattatctcctttgggattttctttgcataatgctatcatgataacaggtgataaatatgtcaaagaagaaaaataaaaagaacaaactcgaaaaaacattggtcgaaaaaatcttagaccaaaataagatcaagtatcgtcaagctcaatttgctgtctccgaagataaaggcggagttgcacaaatgaacacttctattttagaagacaaagagcgtttagtctataaaactctcgtctgcgaaggaaataaaactggtccattggttggtgttgtaccagttactgaacatttaagcatgaaaaagttagctaaagtttctggtaacaaaaaatgtgaaatgcttcccttaaagaaattagccaaaacaactggttatgtacatggcgctaatactcctatcggaatttattttaaggaaaaatttcctatctatttggatgattctatgcaaggaaatcctgaaattggtgtttctagtggtgaagttggccggagtgtctttttgaacccagaagacttagccaaattctgccatgctccttttgttgatctaaaagaataaaaagcgcttacaatttattgcgttattcttcttcttttgtgttatattaaataatgtaccgcatacagaatataacaattacatagaagaagatgacaaaaatgaatttattgttaggaattgttggctttgtagttgccatgatcgctgcctttgttgttacggcattagcaattgccaagtaaataaagcaaaaaaataataacagatttaaaatgacgtggtttgatatcatgccattttttattttttatataatagttatttattatcaaattataagtatttaatatataaggctaaactatttatactaaaaagaaaagtcttgcctataaaaaaagttgaatttatatcagcaatgttatttatttgtgctaatctaaatatgttgtcaaatgtaaaaagaacacattgataataaattgtaaaagactcagtcttttacgttcccaaaagaaggtttagataaatgaaacacaaaaatgatttgagcttcaatgcaaaatttaatggaaaacaaaaatttggttttagaaagttgtctgttggtttagctgcagttgcacttagcactacttttttcttaagtaatagtcaacttgttcatgcggatactaatactgcgactaatgaagaacaaactcaacaagattcacaaaaatctaatcaagaacagtcaaataataccatccagtcgactcaagctgatccaagtaaccaaaataatcaaagttcaactaaaaattcaccaaaccaagaaaaaacaaaacaacaaacagtcgaaattaccgctttttatacagatgaaaaaggtaataacgcttctgaaataaaaaaagatgaatcagcttctttaatggctggtcaagataccatcaatgttgacattaaaatcaaccagcctaaattagatcaaaataattctttaactattaacttgccagatactggagaaagtaaaaactatcaaattaatactggaaaaacaaagattttcagtaataatgccggtagtcaatcttactgggatattacggcagtcgatcataatgacaatagtcaacttgttgccgtttagaataattcgattagcaaagattcacccgactaccttgatttaaccatcccagctcttgctaatggatccacagttaaatcagatttaaaaaatcaggctttcaatgtagaaattgatggaaaaagccaaatcgccttcacagctgatttaacaccttacaaggataaagttacccccccaactgaattgatccatggctttgctatgggacaaaagtcattcaacggttctgatgatggtaaagtatacccagagaaaaacaatatctcagaagaagatattaaccaattaaaattaaacgatgacagtcacctgcttcaatggggaatctatttcaattatgataatcaattaaataatcctcccctttccttgtataatgcaatatttaaagttgcttttagtcaagatcaaactttaattccttcttcaatcaaagtcttcgagattccaagtggaatgtccgtggatcaaaatgcattacggcacggaattaaggatttttacgatggagctgataagtccgatgaaaattactacagcataattgctactggaaataatgaaaagacaaaatttgcggactttttgcgtgctcatttagttaaaaatgcaactggacaagctactggtttctcagtaaaccaaactggtcaaaaattcaatcctaatgatcctagttatgactacagtacccatgcatacttcattcaattagatactgtactaagtaataaatctggccaaccaactagtagtactggcatgacctctgatacatcaaaaaatactttagctggtcaagggcttagtgctgattacaaaaataaagacgaccaatcagctaatacccctattcaatttagcaggttagaagaagcattagctttatttaaaaataagcactataaaattgaaaaagtttctggcgccaatgccacattaaaaacggacagcagtatcggctttggcaacttttataataatgaaaatgtagatcaacacttcatcatttacttagttcatgaaacgcagatagaaaagcaaactgctacagttggggaagaagtaaaaggctactatgtaaacggtcctaagagccaaaacttttccggtataaataatccagatgtggctgttcctaaaaatgatgaaacacctactccaaatgtagtaaaagaagttatttactctagaagcagggtggttgatttagttaaggatccgcaaggcacagaaacaaactggtcacaatggatatcaaacaatcaagcattttcagctattccgtataacaatactacaattaaagacataattgatggccattatcatttagataaaaatggcgtgattcacattgcttcttcacagaataaacttactgctacaagcaattcaattactgagatttccgcaattgcacctaattcggagtttttagcttcaattgcttctaccacagttaatggtcaaaaaacaacaactggcaatctagcaactattagcatttgggtaccctatagttactccgcttctaaaccggaaccaaccccaactcctattcctatacctgaatctgagactccgactactccagaacaaccgaagcagccttctgagccgaatacaccatatgagtctgaaccacctaagtctatgaatacaaacagacaaagattcacaaaaaagtaaattggaattctagcagtcatccttatggcactgatatgcaaagacagaagcaacacaaagatggaattattccaccccatggaactgccattaataatattccaaattcaacaacaaagactagaactactaataatatcgttaagtcttacaataatattagttctaaattaccacaaactagtcaaaataattctaacctgagcttaatcggtctagctttagcaacactaggactactgggatttactattacaaaaagaaaacatgattaattaacaatcgcaaactaaaagagacagaccaaaaatctgtctcttttttctaccttaatttatttaatctgcatgtctccacttcttatcagttaagatacgtgcagctaaaagacctaatggcaaggccacgacaatcatcaacgcttctacgatccaataagccccgatattaatattcgtgattccaaagttaaatacagctcgatacatgtaaagaccaggcaccataattacaattgatggaacagtaattgcaattcttggaaaaccaacttttttccttacaatacttgctaatagaccagctgttaaagcaccaataaatgctgccaaagctggagcaacctgagcataatcgactaagctaagacgtaatgtatttgccattgctcccattaccgcggctgtagctgccatttgtggtcgactgttaaacataattgaaaaaccaaacaccccacaaaagctagccagcaatcgcaagcaggttaacgtccctggatcaatttttaacttaggcatagatcctggatgcaaacgcaaaattgttgctacagcccagcctgccatcgttgcaattacgataattaaaatcgcataagtgagccgttcaagcccagagcgcatatctaacttagacatgtccaatccagatgtaataaatggaaaacccggaattacgaacaacatggcaccaatatagccataggcatgatcatgattaatgtggaataatatttctcctacatgaaaactcataaagtaaacactgcaggctatggcaaccgcaaccgcaatcttggctaccaaagttaacctgtgcttacccataattgctctaatatattgaccgcaagctgcacccaaaaaagcacagatcacctcaggaagaccgccgcctaataagaaaataaagccgccgcaggccaagcctgaactaagtcccgaaattaacggagaatacgctgacttttgctgagaaatctcccgtaagcgtttatgaatttgaccgatagtccattccccatgtcccttttcaaattgccgaacgaatttttccatttcattcaacttagtcatattcacacctgttgctggtaacgataaagtctgggaatatgattcattatcaacatcaaaacaggtatattcaattgacactaatccaatatccgttgaacaggtaatgcccaaggttctggcaaccgtatccattgaatcacgtactcgccaagcacctgtaccacagcttaaaagcataatacctactcgacctacaatcgaggtcttttcaactaatgttgcatcctgcgccatcgtattattatcgctcttgaaaaattcctcccacagaatcttcatatgatgtttttctgataaatgatgttctcgatcaatttcactcatgctattattacttttcctcacatagttcgcataattataactattatattctaccacaggaatttcatcataatttttgatattttaaaatttgctgcttctttttattattttaaatttataatagacatataagttattttgaaataaaggatgatttaaagtggctcaattaactgatgaacaacttgctaacattgctcatgacttttaccttagtcagcttaatattgctgatatctcacaaaaatatgatttatcgcgatatttaatcgctaaagcactagaagacgcgcgtaaccgtggaattgttaaaattaaaatctcgcgtggaatcaaacgcaatcaggtactagagagagaatttcagaaaagattcagattaaaagaagcttttattgtcgaaactaccggcaaccgcgatgaaaatagtgaagccgtagttaacttcgctgctaaacaaattgaaacctatctaaagcaagcaaaaatcgctggtattagttggggtgcaacaatgcatggcgtgatcaacgacttttttgagcaggacttagagcaactttactttattcaattacttggtcaaccaattaattctaaccgcaggaagaatccattggcccaagatgcggcagaaaaattgcattcccatagtctaagtctgccaaccccactttatatactaaatccaaagatcatgcctgccttgaaacatgagccttattttaaagtaattgaaaattgttatcatcacttagacatgcttttcactggtcttagtactttccaatcatttcaagctaatcaatttttgaaagaaaattatggacctgaactatttaaagacattcctgactgcgatgtagctggaatgatcatgggacgaccatataatattaaaggtgaatttttccctgacttcgaacaacacatttgtggtatcagcatgaatgacattatgaaaacgccaattcgtttttgtgtcgtccgcaatcgctttaaatctgaggcactccttggcgccttacgtagcggtatcattactcatctagtaactaatgatgcaattgcccaacgcgttttgcaaaatatcgattaattcgctaaagtaatacagagatagactatttataatgaggagaaaaaatgaaaaaatctaaatatgatttatggattggtgcactgaacctgatcaattgtgtgttattcattagctcttggtttgccatccttggagctgacttcactgctagaatagctttaatattttacttatttgcctggttcggcgtgatccttaatgccgttgcagtagtgcaatcgcataacatgaatatctcactaattgggccaattttaggagtaattggtaatgcactatatggctttaccgctgctctagccttacctgctgtgattgttaatattatttctgccttctttatctttatgcaacatagcaataaaaaatagaaaaaacagccaaaaattggctgctttttctatgctaaaatctgttatgtactggtcaacaattactaaagtggatttacaatgactgggaggtgagaattatggagtttagaattgacgaatgtattccagatgttgtatcaatgatggctttagcacaagcaattgcaaattttgacctcaatggtaaaaagccacaagatgtgaacctaggaaggatggcaaatgtctaaagtttttcgaaatgacttaaaaataaaggacatccctaatcaaagaaaacttagggatgtctttttttagcctaaatatgaaattgctacttgtaattgtgccagcttcattgccgcctgagccacattcttgcgatcaacatcaacaaaaatctcacagtgtttttcatcaaattcataacctgaccctagcgcaatatcttccgcagtttcatataactctttatcttcttcattaggatctagcttaaatagaattcgtccgccatcactaacgcggcaatgatcatcggcttcctcaacccaaacatatacggtatcgccataagaatcaatcatcattgtggcaatctgcaatgtcctatcgtcaacccaaattgtcttggttaccttagcaacatacgaacctatttcatggttaattttctttaattcatcctgcttcattttttacctctaatttataaattcttttctttaatataaggataccctcttagtaattcttctacaaatttattaaatagattgaatctcccaatcagcttgactgttaccgcttactaattataccttgtaaatatactaaattttggagaaaaatatgcatactaagggtttatcagttaaaaatgttgtagcgatcggaattggatcggcaatctatgttattttagcacgtttcacatcgattcctacgcctattcctaacacaaatattgaattagtctttccttttttggctctttttgcgtcaatctatggcgctaaggtcggttttattgtcggctttattggacatgctttgtccgatttcattatgtacgggcagacttggtggagctgggtattagctactgctgttttaggctggatcatcggtttagcggccaaacgcttagacttaaaaaatggtatttttggtattaaacaaataatcttttttaatatcattcaaattattgccaatattctcgcctggattgtagttgcaccaatcggtgacattatcatctatagcgaacctgctaacaaagtttttgtccaaggaatttcggctacgctttctaatggtattacaattatggtcattggcacgctcctacttaaagcttatgctggaaccaagattaaaaaaggcagcttgcgcaaggaggattaaacaatgcctaaaacaattattgaattcaaagatttttcatttaagtatgacagtcaggccgagccaacactaaaacagattaatctaactatcaaacaaggtgaaaaattgttaattgctggaccatcaggttcaggtaaatcgaccattggccgctgtattaacggcctaattcctaatctagatactggtgagatcaccggtgaatgcactattaacggcaagaatattaaagacactaacctatttgatctttctttcaccacctcaactatcctacaagatactgacagtcaatttatcggcttaactgttggtgaagacattgcttttgctttggaaaacgactgccaaccacaaaatcatatgaaacaagttgttcatcgctgggctgatgaattagggattgagcatttattaaagcaggcgccacaaaatctatctggtggtcaaaaacaaattgttgctctagctggtgtcatggttgatgaatcaccaattttactttttgacgagccacttgctaatttagacccagcttcaggaatgaaaacgatggctttaattgatcgcattcaaaaagaattaagtgcgacagtaatcattattgaacaccgtctagaagaagttttgagtcagcctatagatcgcattatcctaattaatgatggtgaaattgtagctgataagaagccaaatgatctattacatgagaattgtttagaagacgttggtgttcgtagtcctctttatttaaatgccttaaaaaaagctaacgtcgaccttacgcgtattcccgacctaacttcagtcgctgctttgccccaagatcctgaaattgctaagcagttgcaagaatggcaaaacaacattaccctaagtggtgaaaaagaagagactcatcctttattagaactcaaaggcgtcggccaccgttatagtaaattgcagattcatcctttacatgacgttacagcgacaatcaatcaaggcgattttgtttcaatagttggtcaaaatggtgcgggaaaaaccaccctttgtcgaattatttgtggctttatcgacaatgagggacttattttatttgatggtgataaccttaagcagttttcaatcaaagagcgttccgataagattggttatgtcatgcaagatcctaaccagatgatttcacaaaaaatgatttttgacgaagtagctctaggcttgcgtctacgtggttatgatgagcagactattcgcactaaggtctatgatactttgaaagtttgtggtctttatccgtaccgcaactggccaatctctgctttatccttcggtcagaaaaagcgagtcacaattgctgcaattttagtgcttaatcctgagttattaattcttgatgaaccaactgcagggcaagattggcaaacttatactgagatcatgaactttttaaaacagcttaatgatcaaggcaaaacaattatgattatcactcacgatatgtacttgctgatggaatacactaacagatccctggcttttgctgatggaacactaattgctgacacagatccaatcaagttattaactgaaaaagctttaattaaaaaggctgctttgaagcgaacctccttatataatctcgctatcaaatatcaattagaaaattcagatagctttgtccgcgcctatattgatgcagaaagggatgaaaaacatgcataatgaaagccaagttttaggttatcaacctggtgattcttttatttatcaattaaacgcaaccactaagttagtttttatactcctagtctcggttgcttgtatggtaacttatgataccagattcttaattgctatctgtattttatcaattttcttgtttaaagaggcaaaaattaagtggagccagatttcttttatcgtgaaatttattgtagttttcatgttgctaaatctgatttttgttttcatctttcagccaagctatggtgaaaatatttatcattctaaaagcatcttgatccatgccggctacttcacattaacattgcaagaggtattctacttattcaatcttttcttaaaatatgtctgctcaattccaatcgtattgctgtttctattaactactaatcctagtcaatttgctgcttcattaaataaaatcggcattagttacaaaatttcctatgctgtttctctagctctacgctacatcccagatatccaaaattcttattgggatatctcagctgctcaacaagcacgtggcaatgaactatccaaaaaggctagtttaggcaaacgaattaaggggacattgaatatcgtgatgcctcttatcttctccagtttggatcgaatcgatacaatttcaacagccatacaattacgccgctttggctcaaagaaaaaacggacctggtatgtcacccaatcatttaaaaaagctgattatcttgtaatgatcgtagccgtgattttggtattaattgtggttggtctctggcaacttgatcatggtagattttataatccatttatttagactaaaattaaaaggacctaatggtcccttttttgttttcgatttttctgtttatgatcatcttgagtgacaatctcaggtttcttaggaatcggcggcgtgattatttcataattacgcaaacggtgttcaagatagtcatctaatcgctcttgcgtattttcatgtacaataatcattaaatcacctcacttttcataattatacctcaaaaatgtaggttaaacagcgtaattactaagtatgccattccactagcaatcacaggacctgcagctacacccttgaaaaccactactccaataatagtacctaaaactaatgcaaccgtcacctgtggcaccgctgctaattgatcaacaccataacgtgacaagatagctacagcaattcccgctaaaatggcaatccatccagctggcgacttaaaagttttaatcagatccttaaagccaatctgtcctgtcgcaataggaactagaattgcaaccgaaataatagttacgccccaattaatcccctttgcttgaatagtaggcagccatttactagtaaacggtaataatttaaacaccattaccactcccgttgcaataattaatgacatgtttttacccactaacgctacaactagcaccaatgctagaaataaccaactttccatatttatctcccctcaaaaaatcattagcattagttcactttaacaaaaatattcatcaaaacaaaataatgagtctaaataagtgaaaatcaatctaatttgtgtcataataaaattactcagaaaaatatatgtatacgcgcacctcgttcttaaaacgaggtgttttttacgcaaagaaccagtgcagatattttaccttcactagttcttcttagttgatcgatattgcgatatgactttactactgcatcgtagttagaatttgcaaatatttatgcttgaaaataaaatatttgcacaaataattaaaaaacgtttcttgcaaaaatacaactaaacattttaataaaaacaaaaagatgccactttcgtgacacctttgtgattacttattcatacatttcgttttgaactaatccctaacttccttaatggtatcaatgatagtaccatcacgatactcaactaaggcaaccgtacgatcagtatattcaagtggctttggtacaccaacttgtttttcagcaattttttgcaattcattaatatccaagatcttaagtcctggcaccttactaaaggcatccactaaatcctggcgagctggattaatggcaattcctctttcagttactaaaacatcaattgatgaacctggagtaacaatagtttctactcttggaacaacagtcgcattacgtccccgaacaagaggagctgtaataatcgtcatcttggcaccagctgcggaatcttggtgaccaccgacggctccacgaatgacaccatctgagccagtcataacattaacattgaagtcaatatcgatttgtaaagctgacaagattgaaacatccaagttgttaaccactgcacccttattatgaggatcagcataccaagaagcatcaatttcttgttgatttttattgttagccattgattgggcagcacccttatcaaagtcctgcacatccataacttttctgactagaccttcttcaagtaagtcagtggtaggtttagtaataccacccaaagcaaatgatgcagtaatgccatcatcaatcatactttgacgtaagtacctggtgacagctaatgcagcaccaccagaaccagtttggaagctaaacccttgcttgtaatatggagagttaatgattacctggttaaccatttgagcaatcttgagttccttaggatccttggtaaagcgagtggcaccagaaccaatcttgtctggatctccgactttatcaattttaaccacataatccacttgatcttgctgaattgacgcaggcgtatttggataatcaacaatattatcagttaataaaacaaccttattagcatagcgagcatccattagggcatagcccaatgagccgaagacagcatccccatcttgaccgttagcattacctgcgggatcagatactggcacacccaagaaggcaacatcaaccttaatctcgccttcttcaattgaacgagcacgattaccatgtgagcggaaaattacaggattcttcaagccgccatgtgaaacaaaatcacctagtgaaccgcgcatacccgaagaagtaatattagtgattactccctttttaatcgcttcgataactttatcattcataacaccagtaagtgaacttggagccaaggttaaatcctggtaacccatactaataatcttgtccattaccaagttaaaaacataatccccatttctaaaatggtggtggaatgaaatagtcataccatctttcaggttattcttgattacctcatcaagtgaatcaataatcttattttgtccagtagtaactcttacctttggagcaacccgcttaacttcaggatgaccaatttcagtagtttcaaatggtttcaaattcatttttttcattaaatcatctggtaattcgcgttttactttattctccaatgtagttaccttctttatcaatcaagttagaagctttcgctgtttccaaaaccctggtagccttttctacaactggcttatcgatcatcttaccattaagtgaaataacgcctgagcccttagctttggcttcacgaatggaattttcaacattcttagcttgctcaatctcttctttagttggattaaagaccttattaaccatttgaatttgacgtgggttaaccaaactcttgccatcataccctagttcatggatatagttagtttcacgatagaagccttcagtatccttcatatttgagaacaccgtatcaaaggcatatacgtctgcggcccgagctgcttgtaaaaccatgttacgcgcaaattccaattcgcgaccatctggataacgatgagtatgcatatctgcagtatagtcttcgccagataccgccaagcccatcattaaaggcgttgcggttgcaatttctggggcatttaagacacccttggctgattcgatggcagccatcacgccaatagaaccattttcaatgtcaaattcatcttcccaatgttcgatatcctttaccaatttttgaatcattgcagctgattcagttttaggcaagcgaataacgtcaacgccggcttttaccattgccttaacatcttcatcgtaaaatggcgtggcttgaccattaacacgaactacaatttcactgccaccgaaatcgactgtcttaattgcctcataaaccaacattctggcagcatctttttccgttaatgaaactgagtcttccaaatcaagcataatcgaatctgcaccataaatgccagcatccttaatcatagctggattattaccaggtacaaacatcatggttctacgcaaacgattcttaacgtatggcatttagagcacctccaaatctggcttgtctgaagtttcggttgcacgttgtgcagctgctaaagtacgagccttaattacacaatccagtgctcccttatcggttgctttaaccttggcattttctaagccataagcttttaaggtgtcagtaatcaccttttcaatctgatctccataggccttttttacttctgattcaaggtcaatctcaatgccgttagaaccctttgaaatcatgatttggatatctgaactctcaagtgttcccgcaactgctgtggttttaatttccatcaatattcattcctttctcaattttagactgcaatttctgcatgttttgcttaataaattcataagtcgtttccggcacgaatttattgatctcttttaaattgccatccttgatcagctgtctaactttagtggcagtaataatttgaccgtctttttccaagcgatcaattacgattacttcaatctcaggaccaagctcatgcgctaggctaacattataaaagtgagtcgttcttgaaattggttctttaccaatataacgacgggtaatgttcagtcctggtgcaatttgattcttaaagacagctgcgtctatcaccgtttgtacagcaattaaatcgtcaggtgattttaagaagtatgctggaaaagtagctggtgaaaccatgtagtctccgccagagattactttcacattactaaactccttagtaccttcttgcaccaatttgaagcgctcatcaaagctaaacaaagaaacatcattagccacaacaaagacataaaccaaatcgttttcttcactagccatcttaatcaaatgttgatgacccaaggtaaacggatttgcattcatgactattgcagcgaccttcttatgctcttgatctgctatttcgggcacttcagccacaaaatccttcacatcaggcgttccattttctaaaaaggctgcctgatccgtcttggctaacaaattgaagtgcaagtgctcaaagctagttgcatactttgctttagtaaagacaaaggaatggaaaattccatcattagtcaaatattgcgttaaggctgtaaccgctttattaaagcgagccccctgcgtatcggcatcattcttgactccgatatactttaagacattaccagccacactaccagtaccaactaaattgccttcctcatcttctagcccaatagtatgatcaatcacgttaacttcgcgttcactaaaatcatttaaccccaatgattccaacaagttttcccatttttgcctagttgtagcgtcgtttaaaaacaaatcaacgactttatccataaatatgccgccttactatttcggtaatcgttttcacaaatatagtttactctcttagtttgattatttcaatttatctattaattttttgaatttttcaaaaattcagcaataatctcatgcgttttttctggttgctcagcctgaggcaaatgcccacattccggtacaatcgccgtttgaacatcttgattcagcatttttatcgcttgagtaaattctggattaaaaaatggcgatttttccccagcaattaccagcatgggaaccggcgtatccaaaatcatgtcacgccaatcttgctccgcatgttcaactaaacagttatagttttcggctggatcatatgggaattcttgatattcttttttagcagccaaaaacattttttcatcaatgtgatggtaacaagccttgccaaaatcaaatttaagcatgtcaggataattatcccaagttaggtctttaaagccatacttccagctcttatccgcaatcatctttggtgactggtctaaatcaaccattgcctttagtctacctttgccataaattgacaaatatgcccaaatattggcagcccccatggaatttccaatagctactacatcatgcaaattgagcttaactaatagctcctctaagtcaactgcatgacgactaatccgctgtccacgataggttcgttcggactgtccttgattgcgtggatcaagcataataaaacgacaatcatttttaaataaggcaattaaatcttgccacatttgacaagatccccctatacctgggatcccaatcaaagcaggcttatcttcatcccccgtatcggtataatgcaaaattacatcgtcattagttttaaatttcatctttaatcttctttcattttgattactcaattctattatgacgcaaaaaaagcaacctggtgattccagattgcttattttttaccataaaccaataatcttcatccaaagaactccgacagttccaaaaataatcatatagattaatccaaggacaaaattcatcttccaccattcaccttgtttaacatagccagtagtagccaaaattgaggcaggaccattagcatagtgagtggttgatgcgttgattgcaccagtaaaggctaaaagcattgcggaaaggcctaaaggagcaccagttgcaaccgcaacagacaagaatggcaaataaagagcagtcatatgtgcagttccacttgcaaagaagtagtgggtgtagaacaaaagcaaaactagaattgccaatacaaagccccagctaacaccatgaagaccattttgaactaatttggagaaccaatcaataaatccgtatgaaatcagcttaccagccatgaacatcaggatagaaagccaaatcaagatattccaagcaccagtttctttcagagcatcctgcattgttaacacaccggtaatcatcaaaatagttacagccaggaaggcaacaaaagtcgcatctaattgtgggatcttaaagaaaccagacaaaacccataaaacaattgaaagaatgaagactgacatcataattttttctggagttgacattggtcccatttttgctaatttttcatcagcccatttcttagcatctggagtttctttaatctcaggtgggtacatcttgtaaataacaaatggaatgattactgccaatacagcaacaggtacgattgcagtgaaaaaccaacctgcccaagacatttgatagcccttttgtgcggctaattgttgagccaccatgttaggagcagcaccggtaataaacaaagccgttgataaaatattggcatgaaaggcagtaaagtcaatgtaggcaccaatctttttacgagaagcatcatctggcttagaatcgtagccttcttttgaaacagattcaacaactggccaaacgaccccacccgtacgagctgagttcgatggaattaaggcaccgagaattaattccaatccagtaatcgcataaccaatacccaatgacttcttaccaaatttttgaatcataatataggcaatacggttacctagacctgttttactaataccatgagccataatgaaggccatagcgattaaccatgcagcagagttaccaaatgaactaagcacgccttgattaactaccataccttttgcatttgtaacgtccttcattggtgctaagccaactaaaacagttactaccaagccagctaaggttgtaccaccaattggcaaaggttttgtaatacaccctacaattgtggcaacgaaaacggcaaacatttgccatgcctgaaccgaaaggccacttgggcgccatggagtaatacaccacaatacaattccaacgatcaaaggccaaataaagcctttataattcactttttctaaagttttcataagaatcccctattctctatggacgatacacatcatcaatgatgtcaaagcctttatctgctaagcttttatctacccaacttaaatcaacttctcctttgctaaaggcaattgctttagcctcatcctgctcatgaaaagcttgtgccttaggcaaaatctcaggagcatctttacgtggaatacaaattactccatcagcatcccctaaaatcacatcacctgggttaacactaacattcccacaagcaacaggtacatttatttcaccaggtccttctttatatggtccacctggggtagtactggttgcataaatcggcagtttccaatttcttaaattatcaatatcacgaattgggccaccaattacaatacctgcaattttcttttgatcgcgtaagtaagacatcattacctcaccaatcaaagatctagtgttatcaccctcgtcgtcgatgacaatcacatcgcctggctggcaatactttaaagccgcataaattgctaagttgtcacccgccctggtgtgaaccgtaaatgcgggaccaaccatttcctcatcaggattcgacattaacttaattctaggattcatagcacaatttcgttccatgcaatccgcggtattagaagctgggatctttttaaaaccagctacaacttttggatcaggcatttgcctctttaaataaattctttttcctacaggcatagagtagctctcccctctttatgctccctaatctatcttgttattgttaaacaagcctttttataaaaactaaaactcatcacaactcacaattagtattatacacttatcaatagattaagcggttacaaattttgaattattttgattttttgcttattttttgaattatttaaactcaaataattatgcaaaaaaagagaactggctaattaaaccagatctctttacttgatctttgttattttgatcttattcaccaaagttttcccaaggcattacatcgattgcaggttgatcaagcaactcttgcaattcttttggtaaaaattctttcttcacaatcacatcataaacatattgttcaaaccaagcttgactcatttcgtagaagcccttgtgaccaaacttgtcgccccatgagttttcaaccttccacttacggatatgaccgttgtcttcatcaacaccgactaaagtcatatcgtgagtagcaaagccctcaccagtattcaaacgatcagccttgctcatttgcgtatcaacgtcaaataattggtcagtcttgtacaattcagtatccaaaaagccagtttttctttccatttgctttaaaacgtcattaccaaagctgactgcttcacctgccttaagttgcgccactgcagcttgagctaaatattcaattggtacattcaaatacttaacttgatcaccaccagcaacattatcataaagtggcaaatggtaaactttgttgtattcatgattagggatgttggacaaagcaacataatcatcgaaattaaagctcttgaaatacttttggacaaaagcttgtggtgtcagatcacgttccaagtgatatttcttatcatcatcacgatattctaagtcaaatttctttggtggttcacccaaggctacagaaaccatgcgataaatctcgttcaagaattccttcttagttttttctgcttcatccttcttaccttcactgactaatttacgcaaaacaagcgcatcttttcgttccttgcgagccaagttctcagcccaagcagtagtattattggtattaaaactctctggcattgcgtatgaaggtactacaccatattttttaactaagttaatggccatggtccaaagaccaccatcttcaccagcaaattcaagccatgctttgacatgacgatcagtcaaaggtttatctgctaaacgaataattgcattgtaaaaagcgttagcacgttcaatcttgtcccagaagaaattataagcttgtgagaacgtaaaatccttgaccttgttttccttgccaaagtagtggcgcaaaacattcaaagtagtgaattcccagcaacgaccagaatgcttctgatcagttacaccgccaatatcaagttcagttgaaaagacatggttaagtcgttctgatacgcggtcattaaatgaagcttcaagcaaaccactacgacgagcagcacgagaagctactttattctcaggattagaattaaagctttcagaaaagccttcaatttcttgttgtgaaataactgtcatgatatacctcgttaattcttatcttttaattttttattaatcttttcttatataatactattttctagcttttttgtcattaagaaaaagtcctagtttttgacaactagggcttttaataaaattaatgatcaattaaaggtttatacctgacaaaacttcttgcatcttgtctgctgagttaatcatcttagcatgctcagtatcggaaagcttagtttcaattaccttttcgatcccttcaccgttaataacggttggggtacctaagtaaagatcatgcttaataccgtattcaccattaatcggagctgaaagtggcaaacaaattgcacgattgtccaaaatagctgagacaatttgagtaagcatcattgcaacaccgtagaatgtagcacctttgttggcaatgatcttgccacccttcttacgcacatcggtctcaatttctgctagaacatcatcgttgatttctgagtaatcacggagtgccttaccagcaactgttgattcatcaaagttttcaaaactagtatcaccgtgttcaccaagaaccattgagttaaccttagcaactgggacattcaaacgctttgaaagttcaacacgaagacgcattgaatcaagtgaagtaccagtaccaattacacggttcttagggaaaccagacaacttttgggtcaaagtcgtcaaaatgtcaactgggtttgcggaaacaacaaagacaccattaaatcctgattcaactactggcttaacaatactttccaaaatcttaacgttcttgttaaccaagtcaagtctagtttcacctggcttacgaggaacaccagcagtgatcacacaaacgtcagcatctttagcatcactataatcggctgcaggatgaatattggtttgacccataaatggcgtaatatcttcaaggtccattgaatcaccaacaggacgatccttagctacatcaaaaattgctaattcatcaacaattgtattttgcaataagtcatttgcaaaagttgaaccaacagcaccatcaccaacaagaaatacttttctactcataagttaaattagtcctttcaaatgtttataaactgttttttatctacatgattaattatacactaagcgctttcattagacacgatttattccataattataaattataatatcccatcaaaatctcgccagtgttattatttctatcgaaaaagagcagttaaccaaccgctctctttacataatctttcttatattatttactttcacgaacatatttagccatctgaatacctgcttgacgaccaaaaataactgtttcggcaattgagttaccaccaattcgattatttccatgaagtccgccagatacttcaccagctgcaaataatccatcaattacattaccattagtatcaagtacttgagtttcagtattaatatgaataccacccatagtatagtgaattgctggatgaacatgaattgcaaagtatggaccacgatcaagttcacgatccatcccagtcgttctgccaaattctttatccttgccagttgcaacggacttattccaagcggcaatggtcttttctaagttggcaccatttacgccaatttttttagctaaatcagccaaatcagtaccatgttctactaaaccaatctggtcataaaactcaactgcagcaaaatgagcccgcacacctgagtcaaaaatcaagtatgccccatcttcatgcaaattagtaattgcactagaaacaatctttcgtgtacttaattcattaacaaaacgttgaccattcttgttaactaagatagcaccttcaccgcgcagaccttcaccaattaaataaacatgcggattatcagtatctgcagttgggtgaacctgaatgaaattcatttgcattagttgagcatcaagtgcttcagcaagcttcagtccatcacctgtagcccctggctgattagtagtcttatagtcaactaagtctggacgatacttcttaatgatatccttggaagcaccaaagccaccagtagctaaaagaaccaccttagctttaactgttttaatgccatctggtgtctcaacttcaacaccattaacgcgcttcttagcatcttgcaacaacttggtaactttagcaccagtaaagatgtcaatacccgcttttttcacctgtgttgtcattcgtgaagttagataaaatccaactggttccattgaagcaggacggtgagcacgtttcttactcatccctcctgtaatggtcaaatcagttaaacgaataccatatttcatcaaccatgaaatagctaaagcagagtggttaacaaagtacttcaacatggcacggtcatttaataaacctccaccttttaaagtttcttcatagaagtcacggttattatcaatgatcccttcgtcaagctgaaccaaagattcagaagcgttcattccacttgaagcacgactagtgttaccaccagttttctcatttttttcaagcacaacaacatttagacctagttcatgagcttgaagtgcagcagtcagacctgctccgcctgagccaacaacgatagcatcatatttattctttaattcttttgtatttggcatttcttactttccctattcttctggagtagacttatcaacattagtcatttgcatatagtccatccattcatcatattgttcttcagtaactttaccactcttcaaagcagcttctcttaaagtagtgccttctttatcagcagtttgcgcaatcttagcagcagcatgataaccaatatgtggcgacaaggcagtaacggtcattaatgaattctcaagtaattcatccattctttcttcattaaccgttaagccatgaatcattttatcagcaaaaccagtaattgtaccagttaaaatatcacaactatctaagaatgatgcaatgatgactgtcttgaagacgttcatttcaaaattaccttgactagaagcaaaggtaatggtggtgtcattaccaaatactttagcagcagccattgtcacagcctctgcctgagttgggttaactttacctggcataatacttgaacctggctcatttgctggaatatttaattcatggtagcccgctctcggacctgaagcaagtaaacgaatatcttgcgcaatcttaaacatatcagcagccaatgttttaagggcaccatgaactacatcaagacctgaatggtgagctaagccccagaatttattagttttaacttcaaatttatgaccatagacttctgataatttaccagcaattttttcggtcattcccggtgctgcattcaagcccgtccctacagcagtcccaccaatagctaattcgtagagagttggcttcaattcacgaatatatgataagtcatgtttaagagcagaaatatagccagataattcttgaccaaaagtcaaaggcgttgcgtcttgtaagtgggttcgaccaactttaacagtcttccaatatttcttttctttaacaactaattcatcaattaagtgttgaattgctggttccaacttgtccaatgcttcaacggcaacaatattcattgcagttggataagtatcattagatgattgaccacggttaacatcatcattaggcaaaatatctaaacctgggtgcaatttattagccaagttagctacaacttcgttaacgttcatgttgctttgagtacctgaaccggtttgcaaaacatgaagtggaaagtccttacgcaagtcagtatcgcttaaagctagcaaatgatcaattgcatcttcaattgcttcgcctttttcttttggttcatcgccaacttcaacgttactttctgcagctgccttctttaagtgtaaaaatgctcgaataatttgcaatggcatcaattcaccacttgggaagttattgcggcttctttcagtttgagggccccataaagcatttttagggatcttaactggaccaatagtgtcactttcaacacggtattcttcttcgctcatattatattcctccttattaagctctataaggtttgcgttaattatcaatcaccatttataatacctgtaaaggctttctttttcaatttcattccaaaaaaagacccaggatttttcctggatcatagttttatctagactggtgattcattcttttagcaaagaagtcaccaatgatttgaacgataaaaatcaaaataattactaatacagtagctactaaagtaacatcattattgaatcggttataaccgtatgaaatagcggtattacctaaaccaccggcacctacagcaccagccattgcagtcaaaccaatcaaagaaataatcgtcaccgtcgaaacacgaatcagttctgagcgagattctcttaaataaacatcaaagataatatcacgcgcagttgagcccaaactttctgcggcttcaaccttacctgggtcaacactttctaaagcaacttgcacctgacgagcataaaatggaaatacgcctaaagttaatggtactaaggctgccttcattccgatctgtgtacctacaattttttgagtaactggtgcaacaaaggcaagcaggataatgaacggaatcgctctgaagattgaaactagcttatctgagaaattgtaccagaatttattgggccgaataccgccatccttagttaaaactaaaatcacgccaaagataataccaagaatgccaccaaagatagctgaccaaaaagtcataaataaggtctgaaaaatactagtgccccagccagcgtctccgccccagccaagttgaacaacattgggtaaatatttacttaagaaactaatcatgatatacattccccttttcatctaaacgtgtaaatgtcacattttgcttagccaaaaattcttgtgtttgcttttgcttagctggatcgcctttcaccaataccaccaaagtaccaattggctcttcattcaaaagttcaacattcccataaagcattgaaacttctacgccaatttgcttatacaattcaataatgattgatttagtcacattagctacgctgtaaactaattgataaattgcttcatttttgccaagcttatcaagcgccaatgaattcaaagtagaaatcgcttcaagtgatccaccaacaaacttcttggttaaatcctgcttaggatgtaagaagacatctcgcaaactgccgtcttcaatcacattgccgtgttccatgacggcgaccttagtggcaatcttcttaacggcatccatttcgtgcgtgattaagatgaccgttaagtggaactttttgttcaaacgcttaagcaggtccaagatttgttgcgtattttgtgggtccaaggcactggttgcttcatcagagatcaaaatatctggattattagccaaagctctagcaatcgctactctttgttgttgcccaccagataattcagctggataaaagtcagccttatcttttaagtcaaccagatcaagcagttccaatgaccgtttttctaattcctcatcactcaacttttcatgttttaaggcaaaggctacattttctaatacagtcgtttcatttaataggttaaaaccctggaagatcattccgatgtttctgcgctttaattgcaattctttattagaaatcacctgcttgccatctttaacaaattcagtgccatcaacggtaatactaccggcagttggtttttgtaaaagattgaccgttctaactaaagttgacttaccggcaccagagaaacctacaattccataaatgtcgcctttttcaatggaaagagaaacattattcactgctttaactggttcgcccttcttctgagggaaggccacttctacattttttaattcaacaatactcatttttgatcctccttacttcaacttaacgtcccaggctgcaatttgcgtattgccatagtattccttagttagcttcttagtttctgcagtttggtaagccttgacgacatcttggtaaagcttgtccttttgttttccttgtttgacacaaagaatgttaatccattgttttgaatctttgttaattggttcaatgtaaatcgtttgcttatcagtcaagccagcaggaccagcataatcattatttactacagaagcgtcaactgaattcaatactcgactagtttgttcagcaccgatttccttaatcttgtagttatttggattgctggtgatatcagctacagtaactaaggtcttacccttcttcaacttaattaagccagcatttttcaaaacaaacagtgctcttgattcgttagtagcatcgttaggcactgcaatcgtggcaccatcaggtaagtcactcaatttatgatacttgcgtgaataaagtctgatcggtgcgatgtaggttctaccaatggcgacaacgccaccgtgatttgccttattccaatcctttaagaaggcatagtgttgaaaagcattcatgtcaatatcgcccgacttcaaggccttgttaggttggttgtaatccgtaaagttcttagtttttaaggtaataccatatttttccttagccgttttagcaattgacttccaaattgcggcttcggctttactttccccaacgattccgactgtaacagtttttgcctgattttgactgggaattcctggaccaaaactaaaccaacctgcaatcacgatcagtatcccaatgatcgtccaaataatggtatttcttcttctccgttttctcataaaatacactcctactttgataaaaataaaaaagcacccatcccaaaaggacgagtgctcgcgttaccacctttaattcgctgatcacttacgtaatcaacctcactggctatcaaaaaatagcctgcactgttaacggatgcagccccgccgatagctaaatatcaccaccggtcatcgttccaaacccatattcactagctcctatttgccaactttcaccaccacgctggctctctttatcaatagaagttctagttactcagtccttcaagatgttgttttcttgatttgttataaataagttatcatcttcttttaatctagtcaacatcttttttaatttttattagataaaagcgatttcattgtataattaggatatagttaaataatttatttttgctaaggagaaaaaatgaagaaaaatcgctttcgaagttttgctctctcattagctgcagcaattggattcatttcttttgctaatactaatgtcccatgcaacaatcaaaccgtctatgctgtttcagataaagcattggtcaatttgaaataccacaacaaagaaattgtgaccgttgatcatgatcagccgcagttttctaagagtacattgagcaagaaaaaaggtccatggcaaaaatatagccaattagattatttgaaccgagctcatgctgctaatgctttactaaataaaagattaatgccacatagtcagcgtgcggctttaacttggaatccgaccggctggcataataaacgaatcgctagtggttggttgtataatcggtgccatctaatcggctatcagttgactggtcaaaacaacaatccacgcaatttgattaccggtacgcgtgaattaaatgatccggatatgcttaaatatgaaaatgaggttgctgaatatttacgtagttcgagcaaaaactatgtccgctatcgggttactccaatatttaaagggaatgacctattagctaacggcgttgaaatggaagccgaagcaactagcaaaaacgggcctcgctttaatgtctacatttttaatgagcaacctggtatgttgcttaattacaagaccggtacttctaaggttaaacatgggtctagtactattgctgaacatgtaaaatctagaaaacgatccacttctcgagtaaccaagaaacgaaccattcaccatatcaaaggtactgtatccactgcagaacaccgagtcgttggcaatcgtcgcagtaagatctaccatgtaatgaatgggcaaaattatcatatgtcatcagctaatgcagtttacttcaacagtgaagctgccgcacaagctgctggatatcgaaaatcattaaggtagtaaaaaagtcagagcaaaactctggctttttcattatcttcttatttcacattatttttgccacgatcatatgcttccttgaattccgcaaaagtcatgttctttcctttttgatcaaagacaaccaacacttcggcgattccatccaaaattttagataaccatctaaagatagtcactgccgcacagaataagaccgccaaaataaataatgatttgttattaagcattgtcaatgagaacaatcttgggaaaaagatagttgagccaataatacagataactgataagcccataacagcaagtctaaatttgtttattggtgccgaaatatgatacatcaccataaaaccaactaagactagcaacatagtcgctgtcgtgcctacctgaccatgatcaagtgagatagaggcccctgcaatgactaaaattgcaactgccagccaatctgttaagccccctggaattgcccgagctaaaacatttggcataaactttccacgaattcgcttgtggttgctttctaaggccaataaaaacgacggcaagccaattgtaaatgcagagatcaatgtgatctgggctggctgcagcggataattgattgtcataatcaaagagaagatggccatcaagaatgaaaaaatatttttcaccaagaacaagctggctgaacgttgaatgttattaactacttgcctgccttggttcaccactaacggcattttagcaaaattagaatcgagcaaaaccacttgtgaagcttgcactgcagcactattaccagaagccatagcgattgagcaatccgcctttttcatcgctaaaatatcgttaactccgtctccagtcatggctacggtattaccttgattttgcaaagcaacgacaaactttcgcttttgatcaggcttaacccggccaaagacattatagttttgcatggcctgctcatattcaccatctttaatggtttgcgcatcgatatacttatctgccccattaattccagcttgcttagctactcgagcaacggttaccggattatccccagaaataaccttgatatcaacaccttgctggttaaaatattgaaaagttgacttggcttctttacgaattggattcgacaataaaatataaccgagaacttgtacattttcctttaaggcggaattatcttcagttaatatgccaggataattagccgcaatcaacacccggtagccttctgccgcatatttttcaaattcagtttgatattgcgcaaattgatcacgcaaaaccatttcaggcgcaccaattaaagttgtctgattgccaaaaattacaccagaatatttattaactgaggtaaaaggcaaaatgctatccgccgttttggttccatctttaaaataggcttgaatcgccttcatcgtcgcgttatcagctggcatgtttttagcaaaatccgcaatgatgctacttaaatcaccagtaaaattcttgctactaacagctttttctacggccatcttcggttcggtaattgttcccgttttatctacacaaaggacatttactcgggctaaagtttcaacactcttcatatcgtgcagcattacttcttgtcgcgctaatcgcatagcagctagagctaaggcaatcgtagtcaataaatatagcccttctggaatcatcccaattaaagcagcttccatggaagtgatactacgcttgagtccaatattattcaaaaagaaactctgactaaatagggcaattcccaccggaataatgatgatgccgacccatttaaccagacgattgattgaacgcaccatttcagattgttcaacactgcccattgcctttgctttgatcgttaatttagaaatatatgagtctttacccactttttctaagacggcataagccttaccggaaactacaaaagaacctgacattaattctgcgtctttagtcttagtgatttcatcagattcacctgtcaacaaggcttcattaacccgcagctcacctgagattacccgcgcatcagctggaatctggtcaccagtttgtaaaagaatgacatcatcttgaaccaatttttcgatgggaattttttcttcttgcccatcacgcaccgcgataatttccgtcgcattcatcacgtttaacttgcttaaaacttttttagcacgaagctcctgcacaataccgataatcgtgtttaaaacaatcactggtaaaaaagtcagatcgttccaggcaccaacaaacaccaatagcacagccaaaatagcaaaaatcaagttaaaataagtaaagacattttctcgaattatttgagtagctgttttggactggtcatcaatggcttgattaacctgtccattttgaattctttgatcaacttcagcttgagttaatcccgttatttgtttatctgtcataattttctgtcctatactgaaaatactttcatccattatagcgaaaaataaaaaagccacgcaactctgcgagactttttaacaattatttattttttctacgataagttaaaaaagtatagtcatacttgttcttttcatcatgatgatgctcttcgcgactaactaattcaaaatcatcatagttaatcgctggcatcactgtatcagttttaaaattagctttgatctctgttttttctaaaagatcaacttgatcaagtaacgccctaaagattgaaactccaccaattgcacagatttcttcagtctgatgttgacgaagatattcatttaattcagctaatgtggacacaatcttcacttgctcattacccgcatatttttgctttaattcttgacgatgagttaaaacaatatgttttctctctggtaacaagtgaggcaaactcgcaaaggtttttcgccccatgatgatcggatgacctatggtcttttccttaaaatgcttcaagtcagccggcagatgccaaggcaaatggccatcgatgccaataccatgctgctgatcttcagcccaaacaaaacttaacattgagacctcctaaactgcaaccggtgccttgatcgtgccatggtgctgataattcagcactttgatatctttcatttcaaagtcttcaatgtgctttttttcaggattaagccacaattcaggtgaatcatatggcgtccgactcagcaattcctttacttggctaaagtggttgcgataaatatgtgcatcccctaaagtatgtacaaattcacccacttttaagccggtttcacgcgcaatcatgttcaagagcagcgaatatgaagcaatattaaatggcacgcctaaaaacatatcaccacttctttgataaagctgcacgctaattttgccatcgactacataaaattgaaacatcacatggcatggtggcaaagcactagttggtatgtcttctggattccaagctgtcacaatcatgcgacgtgaatctggtgtttctttaatttgcttaattacattagcgatttgatctataaagccaccacttcttttttcccagtgacgccactgtgctccataaacatcacccaaattgccatatttttgtgcaaatgcagggtcatctaatattcgttgatcaaattttttcatttctgcttgataaacttgattaaattctggatcactttgactacgcaagccaaaatctgtcatatcagccccctgatattcagcactttcaatccaatttttaaaggcccattcatcccaaatatgattgttatgctctaacaaaaagcgaatattagtatcgccccgtaagaaccacaataattcacttttaattaaaccaaacggcactttcttagtcgttaaaagtggaaagccctgtgtcaaatcaaaacgcatttgggcaccaaaatatgatctagttccagtaccagttcgatcatccttgtcatgtccttcagtcataattttttctaacaaatccaaatatggttgttcaagaattgccattatcttcacctttcaaaaaacatttcttctaacataccatagatcttgtatgttggataatgaaaaaccatagatttagtatttcatacaaaaaataaaaaggtgaataatcaccttaattatttttcttaaattcacttttatgtctgactaagtagacaattgttgccacaatcaagactagtgccccagcgataactgaaattcttgtatcaggattgataaacataaaaatcacaatcagtattaacattgcaaaggcaaaataattcgagaatggatacaaaggcaacttgaatggatgatcttgcattgcacctttgttatgtcgtctaaatcttaattcagccagcaaaatcacaaaccacgggatcatccctggtaaaacagaggaactaaagacaatcacgaataagtcactggctgaatgattgaattgcgaagcaattacattcaaaacaaaaccaataaaaataccaccagaaatgcccataatggcccgatcgggtacaattcgcttagaaatatgcttaaaaataccaggagcttcatgatcatgtgacagtttaaacagcattctacttgaagaataaattcctgaattagctccagaaagagccgctgttaaaacaacgaagttaattattgaagcagccgcagtaatccctactttagcgaaagtcgttacaaatggtgaacctaggctgtctaatttatcccaaggataaatcgttacaatgacaaaaattgctccgacatagaaaattagaattctaaacaaaactgacttaacacttttaacgattgcctcttgtggattggctacttctccagcagaaatacctaataactcgattccttcatatgaaccaacaatgattgacattgaaaagaaaaatccttttattccaccagtaaagaaaccaccgtgagaccataaattgctaaagccagttggatgtcccccattaccaacgccaaagaaaataacaataaagcctaaaataatcattagaataattgttactactttgatcatggcaaaccaaaattctaatgaagcataggctttagcactagctaagttggccaaaagcagaaaggcaataatgatgatccccgaccacaatgctgaaatatttggccaccagtacttcaaatattcagttgccgcgactacttcggacattcctactacaatatattcaaagacattggcccacatcgctaaatagccggctaagggatgcacatattctgttgcataatcagcaaatgaacctgtaccaggattgatatagagcatctctcctagtgctcgcatcacaatgtataaaattaagccaacaaacatgtaggctaataatactgacggaccggtccacttaatagtagatgtagaccccataaacaaaccaacaccaatagcaccgccaagtgaaatcatctccatttggcctgctgtcatcgtccgtttgagctgaggagctttagattttttattcaattttcacaactccaataattaatctatcctaattaataacccgcaattaatttactggttaaatcaccattttgtcaaggttcaaattaaaaatattaatatttgggagtcttttctctaattgatcttttattcctttattaaatgaatttcacgatcaaacatttgctgcatctttttattaaaattatgggcaataaagacaattgttgccttgctttttaatagcttttgcaaaatattcatagtcgcagtctgatcaattgcactagttccttcatcaatcaaaataatgtcactgtcatgaatcttagctcttgctaagacgattttttgacgttgtcctccggaatatccaagtcaattttttcatcgacacctgctttaaactttttaatatcggccgcaaaattaacttcatcaagcacttgagctacttgattattaagttgcttgttgaacattgtaatgttttctttaattgtacccggaaataggttcggctcttgtggaatatagcctattcttgacatattaggcttaattgtcaaaccttgactattttgaaattcaattttgcctgtgctaggtttaagttcacccaaaatcaatttaaataaagtagacttacctgcgcctgaatctcctgttaataagattttctcgccaggtttaactgcaatatcaggaaaagtaagcttttcaccattaggatactgcaaagccaaatcttttgttgaaaatgctactggtgtctcttcttggccagctttaactttttcaatcacagtagcatcaccatcaacttgtttcattaaatcctgtgacgatttcataaaacttaatgcctgaattgtttgttgtaagccgatcgaaatattagctgcaaagttttggacagacataattgcaccaaaaatcactaaattcttagtgatcaaaaaagccgtcaaagacaacaggattatttgtcctaccatgttacagatcccattcaaaataattaattgctgttgagcagccgtttgtttaacatgagcctgttctactttacttgaagttttttcacctacctgaaataacttagcaccagcaaaatatcttcttaattcttctaagccagagaaccatttagctaaaacatctagataatgcttattttgctcagaaacattattagttgcttgttccattttcttttgtactaatttaggtacaaagtaagaaacaatatcaatcactacactagtcaaaaagattgaccaattaattgtaagtagagccaccaatgccgcaacaaacattgagccatagaacggcacaattggataccaatcaaaataattttttctaatcatttctaaatcattagtcatccgattttgcacggccggtacttgatgattttgaccatctctaaagtaatgtgtagccaaacgagcgcgcacctttttattatattcttcttcctgcactcgaattacaaattggatataatagatcatcccttgagcagctaaatataaaatccccattaaagccgtcgcaagtaaaatcttcacccaagcacgatctttgatataagtcagccagtacatttgaatgtagcctgcaccaatagcagcgacacctgaaataactgataaaatattaatgtaaataaatcttaaataattagttttaataaagcctttgaaactcaatcagcgtcacctcgattagtcaatttaatttgtcgatcaaacattgaaactaattctgtagaataattgtgcgcaatcataattacagtacttggagtattcaataaattttgtaatacttgcttcgtcccagcactgtcaattgcactagtcccttcatcgatcaatagccaaggtgattgatgaatcaaagctctggataacacaagcttctgcctttgtcctccagataaatttcctttatccaaatcaatttgactattaagtccagcagacatcttattcaaatccttggtaaaacctacttgatctaatacacctgaaatttgattatttaaagcactattaaacatcgtgacattattggcaattgtgtcaggaaacaaggtattatcttgagcaatatagcctaattcatcaagatcaaaatttaatttttgaccattatgatcaaaaaaattgatctcaccttggctgggcgttaatttacctaaaattaatttaaataaagttgacttgccagttccactatcaccagtaagcaagattttttcaccttgcttaactgtaaaatctgggtaagataaatactcaccatttttgaattgtaaggccagatcttttacttctagccagttaatcttcttaacttgatgctgatctggagctatttttactggagcttgaagattagtaatttccttattcaaatccttggtagatttaattaaattccattccgttacaaatgctgaaacaccattcattacagttgaactaaattgaatagtagtaattaccccaccaaaaacaatttgtccttgcaaatataagtaagcacataaaaccatcaagagcatttgtcccacaatattaactacaaaggtgatcatatctgcaatagcaatagttgctccttgatgaatagctgcttttttatattcgtctgcgctttggttaactgattcactaaatatattaaaactggcatatcttcgtaattcatccaggccactcatccactgggctaaagtgtttaagaacttttcatttttcttagtaacctttattgtggccgatgaagtcattttttcaaaagttttaggcaaaaataatgaaattgcagttaaaatcaccgtcattactactaaaagccagttaaatgaaaacaaaattccaattgagaaaagcacagacaacaagtacataaaaccgtttttgattggttttaaataattctgtgttagctgatcaagattggcaaccaattcattttgcactttagcagtttgggcaatttcatttttaaaaaagtagcgactaatttttacacgaatttgatgcaaataagattgtgattgctttccgtataagtaatctgaactagtaatcaaggctaatctaactagatcacagccaatagccaaacaaataaaaataataaagccaaataaattcattttctttagctggttaaaggccggggtcatcaaatattgcgaagcagcatcaacggtcgtaccaatgataaccattagaaaaattaaaatgaatttagctttattgaccttaaaaatccctttaatactcatttgtctcatctccaagcaaattaaaatattaaaaatatcttatttatgtttaatattaccgctatttttttaatattcaatcactttttactaagtggttaaaaaaataacttgaacggcaaaattattactatatctagctaattcattaggaaaaattgggaaaaaaatagactagaaactcattatcaagcttctagcccattagtttaattcaattattaacggtaattcttcaagaaatccatcatcttttgataagctgcatcatgatctgcatcatatgcatcgactacatcgactactttattatccttagtaataatacggtactcacgtaagtctttcttttcattagcaacaactgtaatctcacccttacctggggtagagaacaattctggattaagttcttcgttcaacttatctgataattgttggttaaatgcgattgtattcatttttgtttttatctcttttctaaaaaatccaacacagacattatatcattattagataacgttgatgaatttagttttattttttatcaaggagaactgtacctgcagaaggattatgatcaattgcaccaatgatggagcagtaacaccttcaatatagcacagcaatacttattccaaaaatatcaatttgttattttgccttattacttttacgtatagatttcacttaattaaatgcacaacaagcatggcaattcctaagaagacaaaaattaaggcaacaatcatactagttactgtgccggtaactaaacctaaaatgatcatgccaataattgaataaatattcatttgttatcccttcaattaaacaataacagcagtatttacttttattatgtagcatgaacactttaaaatacaattttaacgtattttaatttgctaactttcgatataacggcaatagctgcccaataccatctaagatgaagttttccatatctgcaacttgatcttgctttctaaaagcaaattttcctaataggaaactggattgagttgcttccttattaaatgaagtctgtttttcagcatctgttaaatactcatttaaggataaatgatcagcaaactccatttcgtttttatcccataagtaccaattattagttgtccgcccttttgcccaatcaggaagatcagttaataatttattgtattgttcaggattatcgccgcgcttttcactcttataatgctgaaacataagataaacctgcagctgcttattatccagcatcacgccgatgcatggacttttatcggctaaagcattcaaacgataagctgcccagtaatgatcgcgtaagttccaaccattggtccaactttcaacatgaactttagcaaatttatcttgtggtaatttttgataaacatttaagtttatttctttccaggtctgccaaatttctttaaaatctgtttttatttgcgctaattcatcttcagaatattgcgatttcaattttttaaaagaaaattcatcccgatcaaaaattgcatacatttcttcagttaattgcgtcattttacaaagcccttaccatatttacgctagtaacaccagttggatctggaatatcatcattggtctcgccttcattataaaaaccacgtttttcataaaatttaatcaatttcggtaaacaagttaaagatatagcttgacgattttgctttctgccctcttgcgctattgcttcaattaattttgtcgctacgccttgtttacggtattcaggcaagaccgctaagctcaagaccatttgatagcgatcatctttttgattaggatgattttcaaaatataattcatcttcaatatagcgtttattaaaagcaggaccaaaaatatgaccaatcacttttccatcttcttgtgcaactaaaaaagtatcaggataattctcaattctaccaatcatatcttgttcagtttgctttttagtcatcttaaatgcgtcagattccagttctactacttcatttaaatcatccattgttacggtgcgaatgatcataataagcatcctccttaggtttatctctaaaagtgaaaaagggttcaaaagtcatctagactcttgaaccctatattattactctctatttaattcttccactttaatttaagacgatcttgctcagtctttttttgaaaatacgtcttcaccttcggtacaacttcttcgccataaattctaatggcattcatcacatcttcatgcggcattgaagcaattggcaaatgaagatagaagcgagttaacccaagttcttccatgactttgatgatcttatttgcaactgtctcgctatcaccaacaaaaattgcaccattttctccgaccgattcaagatattgttcatatgtcatccctgtccattgcggtctttccgtactaatttgatcaactaacaatttggtaggatagaagtaatccttaattgctttgtctttatcatgatttaaccagccccaagagtgtgcagcaattggcatcttcgttaaatcattgccaactttttctgcaactcttctgtacaacttaattagtggtttaaagtgcaaaggatcaccgccaattatcgcataaacgattggcaaacctaactctgcagttcggatagtcgattctatgcttccgcctgtagctacagaaatagggattggctttttagtgcgcggataaattcctttatgatcaactctaggtgtaaactttccttttggcaaatcgagaatttcttctttgttcattttgagtagcatttctagtttttcaataaaaagttcatcgtaattttctaaatcataaccgaatagatcaaatgcctcagtaaatgatccacgtcctgccatgatttcaactcttcctggtgcgattgcatccattgttgcatattgttcataaactctaattggattaattgttggtagatttgtagtagcacttgaaagatggatttgcttagttttcgaagcagcagctgctaaaatgatttccggtgctgagacagcaaaatctttgcgatggtgttcaccgattgcaaatgcatcaatattcaatttgtctgcaagaatgatttcttctaataagtctctgattctttgatcatgactaattgcttttcctgttgtttctaatggtgtagtttcaccaaatgatgagatacctaattcaatattcatttttatcaactcctaaattatttaacttactttttgtaagtaaaataatagcagataatttttgaaaaagcaatatcttgaatatgtgagtaagtgtcaatgtttttgcggtagcctttaaaccattagtctaaccttaatttcttaaatatttatatgacttaaatttctgcttagcttgcttaaataactattgccagctacctgtgcggttaatgcgccatgctggatgcctaaatgaacttcatgacgcttctttaagctgtcacgggccgctgcttttaattcctgttcagtcaatacagttatttctgaatcttcaaactcgctgctaagccaaaattccagctctcgattcttgatgcagcttaagatcctaagcatgccttctgctccagattttgaccatttcttgccttgccccttaacacggtaggtatacttgcggtggttgctctcgcagcagccaatggctttagtcacagtcagttttcgtttcttaaacggcttaatatcgtcccaatgacgatcaatataattccttaggcgccccagataatcatgattgagctcggtattcaattcatcaattagtcggctttctgcagtggttaggatagttttaactttgtcatagctgtatttgtattccaaagcagaaatcagcttgccttgcaggtcaggcgcaaaatatagcctttctttgattttcttatttaggtgaaagacatccaagaaatgctcatgacgcttgcatagccctacaatgtcatcgaagtctgttttggcatatccagcaccgccatcggcgttgctaagaattacagtatcagaaagatcataagtattggccaggtactccttggcttcgttcagcgcatcaagtcggcttaaagaaacaaattccttggcattgattcgctttctgcgtttcttgcttatattgacaatgccttcacagacctgatagcgatgaaattccaaccggcttttagtgcctttgatcaccacgccatcgccttcaagatacaaaactgggacctttttcttagtgcctgcggcatcatatcttgaatctgcttcttggcccgctttaatatttttcccggccatttttaccaaattgcccacctgcatatggctaatattaaagccagacaggcaattgactgctagagcagtattgcgataagtggcaacgctgcttacttctaagatgtttttgactgctaaaatactgtagcgcttgtatttgtcaaagcccattaattcatccaagggataccttgcttgtttgcctgggcagacatatcttcttctgacatacctaacttcgccaaaagccatattgattgagcgctcattcttcttatcaatctgatagccctgtgctttaaccttggtaatcatttcatcatcaactttagctaaagccaaggccatgatttccttaatcaggtttaagaagaaacagattatttttctttcacgcttaatataattatcttcagactttataatatttgcgatttcagttacaattgaattcataaaagaccagcttctaatgtgttttttgttcttaacatcagactactggtctttttgtttgagctcaagtccaaattcaaaggacttgggcttttttaattatttattcaacttaccgtaaaaaattatacacttagaatatgtgatcctttacttagttgcagttcttctaccaacatatttgataaataaagccatgattaaaataactaaacataaaagaaaaatatatgcatgctgtgttccgattctggttaaatcagctgacttagtacctttttgactagaagcaacgattgctgaagtaattgaagttccgacagcaccggcaaattgttgagcagtatttagaatagcgttgccttgagtagtttcactctcatcaatcactgccaaagtatcagtcataacatctcccaatatcattcccattcctgccatgtaaatgatataaactatcaatataaaaatattattcatctgattaggtaatactgcaaaaaacaatgtttcaagcaacatcaaacttacaccaaataaaacaggtttgcgtgcaccataattatctagcaaccgaccaccaattggacccatgattgcaccagcaactcctgctggcaaaacaatcaagcctgctaaaaaagcagtattatgattaaccaattgaatgaaatttggcaataaaaatgcattgcccaaagatattagttgaatgcagaaaaaaccaataatatgacctgtaaaactatgatttttaaataattttagatccaaaattggcattttaattcgattagatctccaaattaacagagctaaagctaataaagcaatcaaaattggaatagcagttgcacccaattgtcctgttcctaagttgctaaagccaaccagcatcccaataaagaagattgcaattatgataaagctaaggcgatcaatcttaacttttttaacagcagatttttgttcaataccccagatgcctaataacaatgaaataataatcaatggaattaaaaaccaaaagacccaacgccaattcaatgcctgtaggacgattccgccaaaggttggcccaagtgctggtgtgattccagtgatcatactgccgacacccatcatagtaccaactttacccttaggcacttgttccaaaataatattaaacattaatggtaaggcgattccagtaccaatgccttgaattactcttccgagcaatagcaccggaaaaattggtgcagtagcatcaactattaagccaagtaaaaacaaaaaattagcggttaaaaatagacttttagttttatatgaactttttaatgcagcagagattggcacgataattgaaactgcaagcaaataaattgaagtcatccattgcacaacattggttgaaacattaaaatcacgcatcaaggttggaaaagcaatattcattgaagtttcaactagaacgccagaaaatgacattaatcccgtggcaattactgctgcaaacacttttgatgatattctttcattatttggttccattttttcctccatttttgacaaattttaaaacttttagtgccgtatttatttcagcttgtgtaaaatgactacgaacttttcgatcatcttgacgcatataatcttttatcttgggaataaatgatttactcttagcagttaaagaaacatccttctgtcttttatcgaccgcattagtaacgcgtttaactaaatctcttttctccattctttgaatcatgattgtcaccgttgaacgctttaaatctagttccttttcaatttcatgttgtgaaacagtttgattttgatgattagaaataaaatctaaagttgtcatttgaacgccggtgatacccaaagtgttagcaaacgtctctcgttcacgatctatttgaacggaagattgcttaataaccttttttatcggttccatataggtcctccttttgttagatgtctaacatattttgcatttatatttgttagatatcaaacatattttttactaatttgagactttagttcaaagtaaatactagtaaatatctatttcatcatttgacgtaaaactcacatctaattctttgagactgtaaaatagtttgtgtaaggatgaatgattccttaaatttatttctttaaacattagaaaaaggagttcctttctcgtatgattggtttgaacaaaaaaacacatacagaaagaagaactccttcatgaatgattttaccaaagattttgctcaagctctattcaatccagacaaaataaatgatttattgcgcaaagagctacaacaggctgttaataacttgttagaagctgaattgaccgcctttctgggctatgatccctatgccagaaatggctggaatactggcaactctagaaatggtgcttatttccgcaaagttgatacgcaatttggcccaattgaagtgcaagtgccccgggatcgcaacggtcaatttcatcagcacacgctgcctgactacaagcagcactcggatatcttggaaagcatgattatcaagctttactccaagggcgtgaccaccagggaaatagccgatctaattgaaaagatgtatggcagccattacagtccagctcaggtatcaaatatttccaagcagatgattccaaaggttgaggcttaccacaaacgcaagctaagcgacaagtttttctgcgtctatttggatgcgacataccttcctttgcgccgagaaacatttgagcgtgaagcagtctatattgccattggcatcaagcctaatgggcacaaggaggtcattgactactgcattgcacctagcgagaacattgaagtctggacagatatgcttcaaaacatgaaatcccgaggcttaaagcaagttgagctttttctttctgatggtgttgttggcatgaaaacagccttggccaggacttatcctaaagctcattttcaacgctgtttggttcatgtcatgcgcaatatctgcgctaaagtacgcgtcgacgatcgtgaaaagatcatgaacgaattcaaacaggtgcatcaacagacaaacaaagaagaagccacagctgtcctgcatgacttctataccaaatggggcaaggtttacagccatgttatcagaagcttgaaagacatagaaccagatctgctggtcttttataactatcccaagcagatcagagcttcaatttattcgactaacatgattgaatcatttaacaatgtgatcaagcgcaaagctaagcctaaggcagagtttccaactgaacagtcgcttgatgcttttattggcattcaggcaatgagctacaatgaccgttatttcaatcgaattcataaaggctttggtcaggttcaggacaccttagaatcctactttgattaaataaataattaaaaaatcaatttacgagaaagaactatttacacaaaagatttgacagtttcaattctttactaagaaaaggattttagttacatttgttgctaaaatagatttattatttctactcaaaataaggagttaatcataaatgaataaactaaacttcgaactactgcatatttttgatgttgttagtagatttgctagcttcagtcaagctagcaactatctctacctagaccaatctactgtcagtaaaaaaattagacagctagaagctattgtcaataagaaattatttattaggaatactaatggtattgtcctcactgctgctggacttgcttttaaaaataagtcagataaaatacttcaagatttaaaagaaataattgcgctaaagccaactataaccaccttacgagtcggggtatttgataatataagtgcctatctgatgcccgatatttttgctgaaaattttaatctatttaatgagggaaaattagatgcaatagttatcaatagcgacttctttactcaaattcaaggttctgcaattgagacgcaaattactaatgaatcttttgcaattctctttcgcaaaaataatgctctcattgcaagccaaaatagtatttcgttaaatgatttaaaaaataaaaatcgtaaatcaaaataactattataaaaaatatttattggtaatagttagctatgcataaagcgaatgaataaagattattaattagctattacgtttcttaatttggcgattttgtgttaacttgattgttatccaaataacaacgtatgaaagaataaaaataaacaatgtccaaatattgatagaccaattatttaacaacatcattattgagaataagctaaaagttccaattaacataaaaagtcttcctttccgaattcactatttaaataagtggttaaattcaaaatacaggatgctaaaatttaaaatcctaaaaattaatatctgtaagctaaatatttaagttattgaactgagtttgctatatttaagttaaaagataataaaaggaggaatttcatgaaagttacttttaaaggaaaagaagttgaattaattggcacaccacctaaggttggcgatgaaatgcctaactttacagttttagacaaaaataagcaagaagttactaaagataatttgttaggtaaaaatactttaatcagcgttgtgccagacatcaacacttccgtttgcagtattcaaactaagacttttaacaaaacaatggatcagtttcctgacgttaactttttaactatttcaactaataccatcaaagaccaacaaaattggtgtgcggctgaaggtgttaaaaatatgcaattaatgtctgatgaaaaattatcttttggtaaagctactggcttactaataccagaatctggaatactagcacgcagtgtgtggattcttgagcctaacggtaaaatcgtttatcgtgaaattgttgatgaaattactcatgagcccgattataatactgctgtaaatgaattaaaaaagttgctgtaaaatttaaaaaagattgcctcagtacatacacatatgctaaggtaatcttttttttctacccaaagtcaagtattatcaatgatttaagaaaataaatttacttgttttaatgatgcgaataaggttaaagcaaataagagtttaaatttaagaaaaagcgaaagtaccacaaataagcctatgaatacttgtagtttttccataggttgcttatacttaagttgattatttgatttcagctaaagtcttttattttcggtggctatgttgtaatcatataattgatcatgtttgataagagcaaacattgtgcgtatcagtttatggactgatgcaatggcgattttcttatagccttgtctatttgaagatcgttttttcttgtcataataatcagttatatggcaaggctgcgtagcctttaccgtctccatttgagtaataactcgataaagtatttttctggcaatatgattgccatgcttggtaatgccaagagaactgtctttttcaccagattggtaccttcctggatcaatgccaacaaacgcatcaatttgagctgaagtgctaaaccgtcttagatcaccgagctctgctactaatctcactgctgtaattctagcaacccctgggatactcaaatagatggataaagcacgagcgtttactgctttagccagcttttccatgtagttaattacatagtcgcgttcttgctggagtgaaaataaattagaaatgttcctttgaatagctctaacgataatactatctttggaatcataaggataagcttctctagcaaaagcgtataatcttgtggttaagtaccgtgccctttgttgtcctattccagaaatagaattaagcatttgagttacctgtgtctcattcttttctagaacatatccagcatgtgggaaaagactaacaagcgcccaataaattctgccagatggatgagacagtatttcttcaatttgtgggaaagtggattggaggttgcggtgcaattgatttttagtagtaactatactcctagtaagttcttcataatagcgactggcattctgaagttcatgatactctctgggctgtggatcacgcagcttttgcggggcattaaattgaattaaagccaggcgataagcatctaccttatcagttttattatggcgtaaattattgtccattagctttttcgctttaagcggattaagcttcaaatacttaatatgataatcctctaagaaagcttgcaggcttagagaataaacaccagtagcttcgaaaacaactaaaggagttatcaaatattggttcagttgctcataaagtttttgatagccaaaggaatcattagagattctaaaagattcgccttgtttgatccggtcattaaccacacaaactgtggaagatttactgctaacatcaataccgaaaataatttgtgattccataatataacctccgctgtgaagataaacctctttatcaacctattaattctaattttctaaacacggcatctaagtgcccacagacttcgaagagacttaagaataggtggtaaagcagtccgtttcttttacgacatcaagtgtctaaaaagctgaagacttgatttgctttatcttcactttctattttagacaaaataaaaagtgccagatcgtgaatccgtcgattcatgatccaacactaggttagtatgtttctttagttcttatattgttccattctttgattaagttcttccttattaaaattatctaaattaattgcttttccacccattaaccaatcaatcatttcaggatctactttatctttaggcgtatcgtaataatcttgcaaagaccatacaccaccaatgtcatcaattattccataaccttttccagaaagtatctttggacacttaggagctgcttgatcagtagtgatgttcttaatatctacttcgaattcccagctatcgccataatcataagttaataataatttatctctcttttcaaaatacgaaaccttagctttttcataatctatgcctgtagccggatcccaatctttcgcttcagcgatactttctgcattttcaaagcgttcctgcgtttttttattcagcaaatcaaacatatgtccaaaatctgcattaaacatatctagcatagcaacttctaatgttttcactgacgtattgccactaataataaatctacgccaagtagatggtttaaaagactttagttttactctaatttcataggtagctcgattgcgagtttgattttcaaaaattgtcttttttcgtgttttctgctttttatcatgactctcaagatcttttcgcaagccttctaaaattctagacaaatcctgagaagacagatctaaatcttcaagttccaaaatctttttaggatttgcttcaattgccgctatcatatcgtttatcaaatcctcatccaggccttgatcggagtatgaattaatttcttcaactacccagtcaatattcatccctatttctttactatcagttttacgaataagacctactctactcaaaaatacatagaaatttttcaaagtatttgtaatctgctctatttctagcggatgtagtttattgttagatatcataatccataaataagaaatcgcttctcctaaatcattagtaactaaatggatcttattacgtaataaataatgatttagataatccggcagcatttgatcaggttggatatatcctattcctgctggtacatatttagcatattgatcaatgagtttttgattattttctttaattttagcaacaatcttttcattgccttttactggtttattttcatatttttcaaaattagagaaatcttcaaattttggcactaagtcaacatacttatatcttcgatttggtttttgcggcttaatagggaaatacgtactaacctcatcaatcatcttagaaataaaattttgtccaatctgactatccaaggcaaaaatagtcgctgacattacagttagcttatctacgatattcttttcatcttttacaacatcaatcaaatttaaatattcgctttgattatcctctataagtttacgaattttttctagcattaaactagcttggcttttagtatcgtaaaaagacatttgcttggactttaccgctgaaactaatttttgttgctgtttaaacaaaataaagtcatagcttttaatcgcattagcaaaaacatcattaaacagtttggtatcaagtttagttaataaaattggaaaactagtgtctttttcaactaataaatagtacttttgcttttgaatatttattacatctgcatcccaaacagtaaaaggctcattcttaataatatcaatcttattttctttaatttctggtgctaagttaataccgtatcgtactggaagcatgtggttctccttattaaaataatttcattttaattttatcatgtctattcacaactattcatctcagaagcaaaaaaatgaaggcaatcactgccttcatctaaaatacacaaattttagtcttcttctaaaaccggtactgtctttttatttctaacatgatatacaactaaaccaattgctaaacctaccagtgctggcactaaccatgataagcccatgctggcaagtggcaaatgatttctaagtgaagccactgctaaaccaaatgaactttgactaaccacacttgggaaagcaactaccatatcgcctaaagctggtacaacagtaaataggattacgaaaaagtaaactacacctgccttattaaacaatggtgaacaaactgatagcaagatcaaaaccatggataaaggatataagaacattaacattggtgttgaccatgaaatgatttgatccaaaccaaagttagcggctaagaatgatgccaagcaactaagtgctaaccaaacgtggtaacttaccttaggaaaatgcttatgaaagtcttgcgcaaaagcagcaaccaaaccaactgcagtagtcaaacaggtaactgtcaataagaatgcaagtaaagcttgaccaaagacaccgccataaacgttaacgatttggttaaaggctaccccaccgttatcagaaactgcaaagcgtccgagtgacattgcacccattaagatcaataacaagtagataaaaccgatttctaaaacggccaagacacctgatttagcaacaacttttgaaacacttttagcatctttttgtcccatgccgcgaacagctgtaacaaccgtgaccccaaaggctaagcctgctaaggcatccattgtgttataaccttctaagaagccatttactaatgctccatgcttataagctgcagttactgctgcagtttgtggattacccaacggacgagcaaaagctacaagaaacactaggaataataatgctaagaataatgggtttaataccttaccaacgttagacaagatattattttgatgataagaaaaagcaaaagcagctaaaaagaataaagctgaaaaaacaagtaaagcggaactttgcatattcttcggcataaatggtgcaataccaactgtgaaagaaacggttgcagttcttggggtaccaaacaatggtccgattgtggcatggattaaaaccataaatactactgcaaatccggcacccagcggcttaccgatgtcgtatactccgtctgcatgagtaattgctactgctaatacagagaataatggtaataaaacccctgtgatcaaaaagccaactgcagctgttccccaatttgctccagctagttgtcctaaatgtaatggaaagattaggttaccagccccaaaaaataatccaaacagcaaggaagcaacaacgagataatttttccatgtaagttttttcgatgtatgatctgtcattttctctcctccaaaacatccctgataaacaaaaaaggccctcagctgcaaattgtaactgagggacgctttgagcgtggtaccaccctttatttatatcactattgctagcaatacctttcacgtacagtcaactacttgacgatacgtaggcactataatgggtgctcccactacttcttactttaagttaagaaatagaactcgaaagtgattttcatttaaacttaggatttatctcctcacacctaacgagactcgctgtaaattaagtctaaattactcttctttctctttgttttcagatttattaaatttgttaataactattttaatcaaaatataatcgttgtcaacaacttttttatttatttttcaaattttctattccccggatttaaaattgaagtgcaacactaagtgttaaacaaaaaggccatgaagacctaaacttgaagtgacgaaaaatcaagaaaggaagatctttatgaccaattcaaattctagcatttctaagcactatcatcaattaaccagcgtacaacgtggacaaattcaagcaatgctggattccggcataacttcccgtactgttatcgctcaagaagtcggctgccataagtcgacaatcagtcgcgaaatcaaacgcggaagtgtcctgcaaagagacagcagctatttattgtatgagcactattacgctgatactgcacagatttattatgagaagcgtcgcaaaaactgctatcagcgcaatccattgaagcattatgctgtctttttgagaatgctctccagacgctttaaagctaaatttgatgccaccagcatcgatgaattcgttggtgaattcaaaaggactatgccaggctacccttgtcccagcacaccaactgtctatcgctatattgatcagggcttgctggacataagcaatattgatctgcctatgaagctcaaaagacgcaggaacaagcgtcatcacggccatagcggtcatgctttgcacaagaagcatcttggcaattccattgaacagcgtcctaaagagattgaagacagaaaaacgccgctgcactgggaaggagatctggttaaaggcgtcagacgcaagaatcagcctgctttaatgactttgaccgaaagaaccacacgctttgaagtagttatcaagattcctgactatcgggcaagcacatgccaaaggctgcttcaaaatgagattgacagacatcctgcctggtttaaatcgatcacgtttgacaatggctctgagtttgcggatatgaccaagatcaaaggctgccagatctacttcgcccacccatattctccatgggaaagaggcaccaatgagaactgcaatggacttctgcgtcaattcttccctaaaggcaaaagcatgaaagataagtcagctgcttatgttcaacaggcaactgatgccattaaccgcaaacatcgtcgaatccttcaatatcacacagcagaagaactcttcaagcaatatatttcctcatagcctaactgttgcacttaatttgacaattcaggaaattttctattcaaattgagtctgccaattaggatcattatttgccgcaaaacacatggtaatttgttcctcagtatttcgcccaagtgaaagcttcggtaaattatctaatgcaaaataatcacaggcatcagtttcatcgttcggcttaaattcaccactaatttctttgcataagtaaaataccttcgtaatgttggtggccaaaattggtttattatgatgattacgatcttgaactgcaataattttgacgggtctaactactctacctgcttcttcatatgcctctttaacacaattttgtgctgtagtttggtcataatcattccagccgcctggcaatgaccattcctgagtcattttttcacggacaagcaaaattttattatccttaaaaattgctgctcgcgtatcaatcttaggtgtttgatagccctcatcacccaaaaagagtgttttaatttgttctttaggtagtcctgtcctagctgccatcatttcgcctgcaattttacggattttttcatagcgctcacgatcaaatacatcatgaccataatgcaatcctgcttgagctaaactttgtaaatctgtcgcccacttgataaattgatcatctgaattcatttttattgcctttaatataaaattctaagaaaaataacaaattccaaattaataggtaaattgaaatacctattttagattttatcacaacccataagtaacttactcctagtgcaaaaattagtagcaatgttaacagattacgaatactaaatcgacattcactcttgttatatacttgatttacgcgtggtgctagttaaatcgttttagttaataaaaaagtccaatcttgttagactcgacttgtaaatagtaataatagaaaagagtctgatctgattgaactgccttaagcttaagcgttttagccaccatttacaagttagttttaaagatttagtgataatttgtcggcactggtatcgtttgtatgcaccggctgagtttactcatcggcgaaatgttgatcaaattaaaactacggacagtctgattttggctttacttatctggcaagctaagacaggaattgaatcacaaagaagattctgtgaatgtttcaattgtttatcacactcacgttttaatcggcgttcacgtcagctattgcaattgatttatcagatacggcaagaaatgaataaaaaggttgacctgaatggacatttcttgatcattgacagctttccggtacctgtttgccaaccaattcgcaactatcgtgctaaaatttttcgcggttatgccaacattggttataaggccaccaagaaaatttacttctatggtttcaaagttcatgccattgttagcgatgacggttacattcttgattatgtcgtaacaaaagcatcagttcatgatgccaaggagacagttgaactgctggaaaatgcccatccatctaattactatcttcttggcgacgaaggctatttaggcaaagaactgcatcaacagctaaaacaaatgggttatgaactttggacaccatatcgtaaaaatatgacaggagctaaaaagcacaatgatcatcaattgatggctattcgcagaacaattgaaagcgacttttcgcttctgacctattacaatgccgagaacaatcgagcacgtagtctgataggctttcaaagccggttggaaattgcaattttagcttataatttggcttattgtctagaaagatttaactagcaccacgcgtacttgatttatagctaatgagaaataatataaggccattgaaaaaataatcaggaaaaacaaaaaagttttatttatgtcatgcacttgtaaatacagtattgctactgttgacaaaaatattgctactacaattgcaatatgactatacattaaaacaaagcctttacttatctgatgatggtcaattaatttatctgataaaactacatagcttgcaaacatcaatactaaagataaaaacaaaaaagcagcataaactaaaggtgtcttactattgaaataacttgtcaaattaacgatagcctcaccaaaggcaataattacgattaaacttactctctctaccaaatgagggaaatttactcgttcagttttaaacatcccttttaaaaacaatggcaaaataaaaccaacaatataaccacttatacaaaaataaattccaacagggtagccgatgattaatcctacaataattaagataaattctattcctaaaatgattaaaaaggcttgtttatcattattatctgcttttacaaatagatactgacaaaataaaattaagatcataacagccattgcaatattaaaatagtgaaaagtaacttgccattcagtattaatattgttagccagataaactgctacaaacatatttaaacctaaaccgccaatatctaaaaattgatttttgctatatcggttaaaatagataacttgataaagccaaatttgcattactacaattacaaccaataaaaattgaagaaaagtaactaaaggtatactgccattaacaggatgatgaatcattgcagtaattcgagaaattgcgtatacaaaaactaaatcatagaataattcaaacattcccacaggcttagcgattatttttttcatactattccctcctcgtattatataaattaaatcagtgataatgattattcttttagtttgtttattcgatcatcagatgctagtctctaattgtcattgaccttggtcaattggtataggttgtttccttctgtagctttgactacttttttagtctgccgcccaagcagttttactaatgacttactcacatgctgtatcgattctggctattactgattcagagcagattcagtcgcagctttttagcttgaacctatgaatacttatattttgcgagattgtcttagaatctgtaattagggactaacatgtgatgatcgatctatgaccaaatatttgctagaaaggaggccattctcaatgaaactttttatcggaattgacgttagttcaaaagatcttcaagtcgctattactgactcagaaaattatcaaaaacctttacttaaccaatctttttctaatgacctgattggtgctaatgaggtcaaaaagataattcttcaacttgctaaacagaacagctatgacaaagtaattatcggcatggaagccacttcaatctatagctttcaccctgcttatttctttgccaatgacgaagatttacaaaaaattaatcttgaaactgatgtcattaatcctaaaaacactaaacgatttcatgacgtttacgaagaaaataagaatgatcctactgatgcctattacatcgctgaatacttacgctttggtaaataccatgtcactattgctcggcaagaggaatacttagctttacagcgtttaactagagctagatatgaaatcacatcttcgctcactagagctaagcagcacttcattgaaactctttattatcgtgtaaacaaactagttaccgttgacaaagacaatattaaaacttctatctttggcgcaacgatgctgtcaattgttactgatagtaaaaccatcgatgaaatcgctgaaatgccaatcgaggatctaattgactaccttcaaaccaaaggacgtggccgcttctctgatccagagactttagctaaagcgatcagaaaagccgttagaggatcatatcgcttaggtaaagtcatgaaagactcgattgatgccgtattatctgtttactatgccgaaattaaaactaatcagaaattgattaagaacttagataaagcaattacagatatcgtccaaacgcttcctgaagagagaatactacaatctattccaggaattgggtcagtttattccgctggtattatcgctgaaatcggcagtattgatcgctttgacactgaagcacagctagctaaatacgctggtctagcttggcgtcaaaagcaatctagtaattttgatagcgaacacaaaccgatgactaaaaacggaaatcattatctaagatattatttggttgaagctgccaacctgattagacaaagagatcccgtttttcggaagtactatcaaaagaaatacgatgaagctttctattctccgcataaacgcgcttgcgttctttgtgcaagaaaattaaccaggaccattttcactctgctcaaaaatggtcaaatctatcaaacaccgaggtgattaattggtctaaaacatttttggaggagtaaataatagttgttaaaaaatcccttgaaatagggcttagttgaaactgtcaaatcttttgtgtaaatagttctttctcgtaaattgattttttaattatttatttaatcaaagtaggattctaaggtgtcctgaacctgaccaaagcctttatgaattcgattgaaataacggtcattgtagctcattgcctgaatgccaataaaagcatcaagcgactgttcagttggaaactctgccttaggcttagctttgcgcttgatcacattgttaaatgattcaatcatgttagtcgaataaattgaagctctgatctgcttgggatagttataaaagaccagcagatctggttctatgtctttcaagcttctgataacatggctgtaaaccttgccccatttggtatagaagtcatgcaggacagctgtggcttcttctttgtttgtctgttgatgcacctgtttgaattcgttcatgatcttttcacgatcgtcgacgcgtactttagcacagatattgcgcatgacatgaaccaagcagcgttgaaaatgagctttaggataagtcctggccaaggctgttttcatgccaacaacaccatcagaaagaaagagctcaacttgcttcaagcctctggacttcatgttttgaagcatctctgtccagacttcaatgttctcactaggcgcaatgcagtagtcaatgacttccttatgtccattaggtttaatgccaatggcaatatagactgcttcacgctcaaacgtttctcggcgcaaaggaaggtatgtcgcatccaaatagacgcagaaaaacttgtcgcttagcttgcgtttgtggtaagcctcaacctttggaatcatctgcttggaaatatttgatacctgagctggactataatggctgccatacatcttttcaattagatcggctatttccctggtggtcacgcccttggagtaaagcttgataatcatgctttccaagatatccgagtgctgcttgtagtcaggcagcgtgtgctgatgaaactgaccgttgcgatcccgaggcacttgcacttcaattgggccaaactgcgtatcaactttgcggaaataagcaccatttctagagttgccagtattccagccatttctggcatagggatcatagcccagaaaggcagtcaattcagcttctagcaagttattaacagcctgttgtagctctttgcgcaataaatcatttattttgtctggattgaatagagcttgagcaaaatctttggtaaaatcattcatgaaggagttcttctttctgtatgtgtttttttgttcaaaccaatcatacgagaaaggaactcctttttctaatgtttaaagaaataaatttaaggaatcattcatccttacacaaactattttacagtctctaagaatcagtttttagcttgattgtgaaaaattatgctaaagtaattattgattaataaattaatttaattggaggaatagccatgccacgaaatcccagaagacacaatcttaatcaattctcagaccaagaaaaagataaattaaaaaatgtcaaaaaagaattagctgaggcccaaaagaaagagcctgaaagtctacaagcctttaacgatggagtgatggccattattattacaattattgttttagaaattcaacctgctctgcatgaaattcattatcagcaattcattagcaatattgctgtctttttaatcactttttttattgtggcagatttctggtatgatctacatttatctttttcatactatattttcaagccttcaaaagcgattgctattctagacttcttttttttagctgatttatcacttctgccagtcatgactaaatggattatggctgaaaattcttctttcgctgtagctaacttgggaattgtttttttaattgccaaaatcttagaatatctaattcaatattttggtgctaaaaatactgcgcgctattcccaaatcatgcggattattattagccgctcctttattagaaaaatgacggttactttatttttaaatgtaatattgatcattctgtcattattcaatgcaaaactagcaatgattctttatctaatagttccagttatttcatttctttttccagttaaacgcaacaaaattatgtgatttttatttaaaagagcgccagtaaactttaactaaatctactggcgctcttttgttacttttcttgttccttacaatgactcttgcaaacacattctttactatttaccattttgcagtggcaaatgccatccttatctgcacaaggacaatttttctgacatttcatttcatcgtgacaaaattcatttttcatgtttatcatctctatattattatgcctatgataatcgaactttccaaccaatatatcttataattttacttttcctaataagattattttatagaaatatctagttaatttgttaatttaatctgctgatcagctaccgatgtaatgaagtaaggatcatgctcaattagtaacatcgttggcttcacactcttaagaagcttaattaattgatcttgattgaatacatctaaataatttgctggctcatcccataaatataaattagcaggttctgtcaatgacttagccaaagctactcgtttctgttgtcccatactcattttttcaattctagttgtaaaatcagcacgcgcaaatcccattttcttaagattgctcaacaaagcttcataagacaaatgatattttttagcaaagtcttttaatgatccgctatacattacaaattcttgtggtaaataagagattttcaaactttcaattagctcataattacctttggcaattagattttgagagatacccagtaaatgcttaattaatgttgactttccagaaccatttttaccttcaatagcaataatttcatgattattcaaagacaaagtcaagcttttaaatagttctctactattttttagttgcaagctaagatcattaagttgcaaaatctcacgatgataatctgcctgaaaattcatagtcagagtaggaactttttcaatattctttagcattccttctttttccgcaatcctcttatccatgcgattgcgtgcattaatcgacttcttcatcatctttgcagcttgatgtccgatcgctcccttatttaatctggttcgacgattgataatatgctgtgttttcatccctaatttcttacgtgcctctattttagctgcccaattatggaattgtaccttttcttggttcaattttttcacttgccctgtaagctttttatttttttcacgatcaaaatcatctcgcctttttttagttacctcataagtcgaataatttccttgatacaaatgaatcgctgtattttcaatcgctaatatatgatcagttacctgattcaaaaaatctcgatcatgactgactacaatatatccttgatcatgcccatttaaatattctgctacttgtttacgacttgtctcatctagatgattagttggttcatcaattagaggaaaagaatcttgatctgtaaatgataaagctagcaaaattttagtttgctcaccaccactcaaggtattgaaaggctgccataataaatcgggatctaaattcattagagttaactctcgttccagcttccattgttcaaaggcaacctgatcttgtaactcataaaaagtaatgtttttagaattttgaatttttacaggataatatgaaaagctagcattaccttgaatttgaccagttccacaatacttacctcgcagtaagtttaaaaaagtagttttacctcttccgtttcgaccaatcaaacctagtttccaatcagtatcaaggtctaggttaagatttttaaaaatatatctattgctgtcttcatattcaaaagataacctactaatcttaagattactcatccaaccacctcgcacaaaaagagcccatacttctagcaagcatagactctctccttacgaaaatgaattgtaataatcgaaggcctgggctttaatcctgctaaaagtacatagtctctccataatataaattactatttggactatgatgctaattacaagattaaaagcgcaacctaaacccttctttcattgaataatattatgctgtaataatagcacctgttttattcttttacaatagatatattaagtaactctatttattccataaaaacttaattaatgcttgatcaacttgagcattttcatgcagttttgaatgttgtgcatttttgccattaatcttttcaactttataagtactgtcaccatcaccaataatatttaggacttgaacatgctttttcatataaagctctcttacacctgtcatttgctgataagttgagtttatcttattaggctttccattaatattcaatcccattcataaattgcatctatataatttctaataaattgctcatactgcaccttaagttacagtatgagcaaagttaatcctttttttaatgtatttaattttacgaccgatgaatacatattattcactaattagtcctagacgctttcttactcttaatacatgacaaatcaatccaagaattaatcctgcaatcccaaaggtcagccacccaaagcctaaattgaaaaatgggaagtactgttgggcaaaaccaagcagtgtctgtaataatcgactttcatgtaacccagctggtaacgcatttaacatgtcaaagaatgctggaattaaggtaagctcagttgtaatccggtaaacgagccggtcattcttaaacagtggtgaaagtagccctaaaataattaaggtaattgctaacggatagaggaacatcagaattggcgttgaccatgcaataatctggttgagtcctaaattagcaaatagaaatgataatccacaattgattcgtaaaaatgttcgatacgaaattttaggaaaacggcgatggaaatcttgcgagaaggcaattactaatcccattgctgaagtcatacaagtgatagttgctaaagttgctaaaattgcatctccagcagttcctaagtaatggtgtgaaatctgagcaagagtaattccaccatttgctgctaatttaaattgatgcaaactagtcgcgcctagccaaattaaagctaaatagataattgcaactcccgcaattccgagaaaaccactcttagccgttgcaagtgaaatttgccgtgtcttcttaatacctaattctctaattgcagtaataatagtaattccaaaggctaatgctgccaagccatccatagtattgtaaccttgcaaaaagccattggaaaaagcatgccttgcatatgaagcagttatagcagcagtatttctagaacccaatggattaatgaatgctaataagaagataaggaataataataacaagaacaagggatttaaaactttaccgattaaagtagtgatctttccctcatgatttgaaaaaagataaactaaactaaagaaaattgctgagtagattaataatcccaaagtattagttgacttagataaataaggggcaattccaatttcataaggaacagtggctgtccggggagttgcaaatagtggtcccaaagtagcgtgaacaagaattaaaaagataagtgcatagtaacgaccattcggcaatgcaagatcatagatcccattcgacttggtaatactaattgccaacagcgccattaatggcagtaaaacaccagaaagcagaaagccactactcgctattagccaattactacctgctaattgacctaaatgaactggaaaaataagatttcccgctccaaacaacattccgaaaataagtgatgcgataatcattgaccgcctaatactcgcttttttggttttcattttaatattcctttcgataaaaattatattaatactaggtacaaaaaaacgtccttataagcataaagcttataaggacgctatcacgcgtgttaccaccttattttagaataatattactattattcccttaccccatacatagcaaaactagatacgttgacgctataacgggcgcgccctcctaaagttacaattactctcacttcaagcactcataggctactttcactttacttttctatccccactcacactaatttgggttcgctgactagttaaggtaaagctaatttcctattcttagtggttattcataccatttatttagtaagtatattacataataaatttaataaagtcaatattattctaaactattttcccggatttaaaattgaagtgcaacactaagtgttaaacaaaaaggccatgaagacctaaacttgaagtgacgaaaaatcaagaaaggaagatcttcatgaccaattcaaattctagcatttctaagcactatcatcaattaaccagcgtacaacgtggacaaattcaagcaatgctggattccggcataacttcccgtactgttatcgctcaagaagtcggctgccataagtcgacaatcagtcgcgaaatcaaacgcggaagtgtcctgcaaagagacagcagctatttattgtatgagcactattacgctgatactgcacagatttattatgagaagcgtcgcaaaaactgctatcagcgcaatccattgaagcattatgctgtctttttgagaatgctctccagacgctttaaagctaaatttgatgccaccagcatcgatgagttcgttggtgaattcaaaaggactatgccaggctacccttgtcccagcacaccaaccgtctatcgctatattgatcagggcttgctggacataagcaatattgatctgcctatgaagctcaaaagacgcaggaacaagcgtcatcacagccatggcggtcacgctttgcacaagaagcatcttggcaattccattgaacagcgtcctaaggaggttgaagacagaaaagctccgctgcactgggaaggagatctggttaaaggcgtcagacgcaagaatcagcctgctttaatgactttgactgaaagaaccacacgctttgaagtagttatcaagattcctgactatcgggcaagcacatgccaaaggctgcttcaaaaggagattgacagacatcctgcctggtttaaatcaatcacgtttgacaatggctctgagtttgcggatatgaccaagatcaagggctgccagatttactttgctcacccatattctccatgggaaaggggcaccaatgagaactgcaatggtcttttgcgtcaattcttccctaagggcaagagcatgaaagacaagtcaaaagcttatgttcaacaggcaactgatgccattaaccacaaatatcgccgaatcctccaatatcacacagcagaggaactcttcaagcaatatatctcttcataacctaactgttgcacttaatttgacaattcaggttactatttttaattttatacttttcgttttgacatcaattggtttcgaatgtatctgcgaaatgcttcatcaccaagtttttgacgcttttcatataattctttggtaatcttaccagtaacataacacatccgatcacgatccttatcagtgacagccttaaagatatcttgagccacttcctcaggcgattctaaactatctgtgtctggcattaacatttttgtttgattttttagtaactgatcaaatcccggcattgcgaatgtctccatcttaaaaccggttttcacaacccctggaacaatgattttcacctgaatgccaaatggcgctaactcatgataaagcatttcacatactccagtcaccgcccacttatctgctgcataaataccatctagagctaatcccatttctccagcaagggaagtagtagtcaaaattaacccacttttcttttttttgaaatatgggataaatttttgggtgacacggatcattcccagcaggttcgtgtttaaggactgctgcatggcttcttcggtcatgtcctcaaagcgagacttcatcccataaccagcattattgaacaaaacatccacctcatgctttttaagaacttccgagactgtctgagaaatttgttcaggcttcgttacatcaagtggataaataaaaacattttgataggatgttaattcggtctctttttcaggtgaacgcatagtagcaatcaccgttcaccctttttctgcaaataattttgctgttgctttgccaattccggatgacgaaccaacgataaaaattgtactcatattcactacactccttatcttaagatggacgattaaattattcactgacgataattaatgacttgattgcttcacgtttatccatcacttcatatgcctgttgaattttgtcaagactaaaacgcttagtaaagacttttcctggatgaattttaccttttaatacagcatcaagaagaatcgcacgatcataagtagtgacggaagcaattcctccgcgaagaccaatgttcttccagaaaagcgtgtttgatgatggttcggtttgtggaacacctactcgaccaacaattgcgcctggacgagctaacttgccagcttgttcaatagcagatacggccccaacacattcaagaaccttcttaactgcatcatcaccacgtaatttagcaccgattacaccacaaaggccaacagcaccatccccgataactgcgaccgtatcgtcttccttggcttcagcacttgcagccgcatggtaaccagttgccatcacatcagctaaagttaaaagatcgtttaattgctcgtccgtgtaatctgaggggtgacctggaatctttactaatgcccagttagcattagtaaaacgaagatattcaccttggtaaccaccattactgccagcttcttggttaacacagttgccatcgaaaccagctaaacaagctacgcagtgaccacaaccatgagtaaatggtgcaattacaaaatcaccaggcttaatatctttaacgttatcgccaacttcttcaacaattgcaattgcttcgtgtccaactaatgatcctttttcacgattagtaatcccacgataccaccataagtcggacccacatacacaagcacgaacaatctttaaaatcgcatctgttggcttttggattattggcttttcaacctcatgaacttccatcttaccagattccataaatacagctgctttcatctaaattcgctcctctaattatttttacattgtattaactcaaactgtaaaccttaaagtccactacaaggcaagtaaaaatttaactcggcttattaatgccaatactttcgcaggaataaagctcatcatcgttaagtaattttgtaaccaaatcaacgattgattttattgaaacatcgggaccaccaaatggttcgcccttatgagtaatttcataattaactggaccaccagtaaaccagccgggacgaataacggtatagtttaaattagacgcttccacgatgtcagcagcgtcccgatatgattgaagaattgggttgctttccaaattactactaataccaattgaagcaggaatctcattataaattcccatcgaactaataaatatcaatcgtgatatgttattacggtccatcgccgcaataatctgcttagcataggcaactaagtcaccgcttaatgctgcaaacaccgcatcctgtcctaccaacgctttgtctaaatcgtgatcatttaatacatccccactgattacagtttctcgttgaggatcaataacattaattcgattggctgaccgcgcaaataatgttaagtgattgtccgtttcatttaatactgtttgagtggttgtagtccccaatgctcctgttgctccaataattaaaatattcttcataacatttgacctcctttaataagtgctggcgatctgcttagtgatcgcccatttaccgttaatcttcgcaaattccatcttcatttgaagcaacaatgtacttactgggcttccccaaacgctagctttaactttattgtgaccaattaagctagcgtgattcccagcaatctgaatgtctgagatctgctcctcatcagaagaataatacttaagcttaccattttggatttgatcgatccattctagtttgggctgagcatacccagtcatgtggtgtaataccatggttgaatctaaaatctgacccaaggtttcaatgtctttatctacgattgcccgattttcctggcggtaaaggtcaataattacctctttatctgtcatcaaatcgtcctttgctaataactgttccatcaaagccttatcaaaaccagtttttctctttttgctttgattaattgtctatatcataacgatcttcaataactaaaccaattcacatttacaattaataatcataagtaaaacttatcaagctaaattcttatatacacaaaaacgccaaaaattagtgaagaagcttctttttgacgtttatttttacctcatagtctatttcttaaaattgtttctttaatagctcagcaaacttttcaatgtaaaagcctgaattatcttgtttccaatatgtatagtaattttgttgaaggggaatatcaccggcataaagcggaattgtcttaacagtttctttattaatcatcgcttgagttcgtttattaacaataaagtacccctgattggctgctaccattatttgagcctcatcgatagtagtaaccgttaaaaaccggctttttattcctaaagcatcccgataatattgttcctcagccgctttttgtgtttcattaacaattaaaatgcatgataagtcagctaattgcgttgctaaaatacggttattatctggatagttcaatggtaaaactaccataaaatcagtttcagttaagaattcattgtggtattcgtttgataaagcacgccgctgatcggagaaagccagatcaattctatcatgttttaataactcaaataactgttcatgagttccgcttttgattttaacctcgacttctggatacatttgcgaaaaatgggcaacagtatgcaaaaattcgttagtaccaaaattcgataaatagcctaaacgtaattcataattgattggtaatttaccaattttttgtgtctgatcaattaattcattagttgttttaacaacttctttggcgtgttggtagaagaattcaccagctgccgtcagttcaaaacttcttccctttcggtcaaacaatttaacatcaagcatattttcaagctccttgatttgctgggaaatggctgactgggaaatattattttcttcggcggcgcgggtaaaattatgtcgatcaaccaccgcaataaaatacttcatctgttgaaacatttacttatcctctcaatttgatttggaattactaaacaaagcaacgatgctcaatatactttgccccttcacgaattgacaacggtgccaactcttgctgattttactcaataaaatcacgaaccatgatttcgcatatatttttcatttgtctagcacattcagggttagcattgtgagcaaaccgttctttcaattgtctataatcaagcatctattcggctccacagcttttttactactatcttatcagatgtttattctcatcaagcatttcttttttctttaattcataatattcttcttcatctaaaaatgacatcacatggttttcaaagtggtcaaacttgtaggctagataattccaagttcattccgttttgcaagtaggataaagcctgtttaacgagaaccaattactaatattgaaaatatttaattttttgcttgactataaatgaatgatcgtttattatacaaatatgcgatacaaagatgaacacaaaaaagaagctatttatgaagcaacaattctacttctaaataaagaaggtttttcatcaacatcaatgtcgaaaattgctaaacatgccggtgtttcagcttcaacaatttatatttattttaagaataaagatgatatgttgaaaaaattgtatttagatactaagaaaaaaatgagcgccaaaatgtttactgatacaacaaatgatgatgctaagtctagcctagctaaggttattcgtaactatattgattttattttagataatcaggatgcttttctctttttgcaacaattcactaactcgccttatatgactgaattagatgagcgcgaagcaagcacctattttactccaatgtatcaattagttaaaaaaggccaagaggagggaacttttaaagatgtagacgctaatttattatttgcctacattgagccaccaattaccgaattagctaagcgtcatttcaaaggagaaatagattttactgaagaaagaattgatgtattaattaacttagcttggagtgctattaaaaagtagcactttaatttttattattacagtgaacgatcattcgtttattataataaaatcaagtgtttacttaatcgtaaccaaaataagcaacaataaatgaacggagactacaactatgcaaaagaaagtaacttttaaaaacaacgaacacgacatgtctggtatcttattctttccagataattttgatgaaaacaagcaataccctgctttctcaatcgcatctcccgctggtgcagttaaggaacaaattgcaactaattatgactcacggttagcaaagtatggctttattgccctagcatttgatacttcacatcaaggtgaaagcggtggcaaccctcgtcaattagaagctccttatgaacgtgtggaagacataaaatgcgctatcgattatttaacaactttgccatacattgacaataatcgtttaggtcagttaggtatttgtgctggcggtggctactcaatgcatacagctatgaccgaccgaagaattaaagctgttgtagctgtaagtatgagcgatccagcatcatggattcgtgacggttttgacggaaaaacctcagttgaaactcaattagccttacttgaagaagcttctaatcaaagaactcgtgaagctaatggtgctgagccaatttatggaactttcgttccagaagaagtaactgaagggatgcctaatactttagtagaagctcatgaatattatcgtaccccacgtgttcaacatcctcgttcaactaacaaggtatcaatgatgtcaattgataaaatgactgacttctccactttcttgtttgctgatcgctactcaactcaaccaattttgatgattgcgggtagcaacgctgacactttccgtttctcagaagatctgctcaaaaaagcagcttcaactaacaaagaactattcactattgaaggtgctactcacggtgatctatatgataaacccgaatacgttgatcaagcagttgaaaaagctgccgctttcttcaaagaaaatctttaaacatattaatgtgaagcgacttaaaatgaataaacaaatagtctacttttcaaacagtggcaataatgagcgtttagctaaaagaattgctcattattatggggttaatgcaacacctattattccagttaatccgtatcctaataaatatcatgagttaacttcacaggcaaaaatagaacgttttcggcacattaatgttgctattaaaccagttaaacttgaatcaaatatcaatactctaatcttagtatcaccaatttggtatgcagatttgccacgccccgtggtcacttttctgaaacaggttcagagatcttttcaacatgttgtttttgtcagtgacaagttcatgataggttttggtatttgcaagcgaacattaaaaaaatatttatcaaagcaaacaactattgatttaatagcagccaacagtaataacttttcattagttaaacaatactttcaaaaataaaaaaaactcttaaagattgacgtgtagagttctgtcttctttaagaggctttttttgtgtttgcttcacgataaatactttgaataaggctttctagtaaatcattgccaaatatacaactatccaattatttttttacctgaattgtcaaattaagtgcaacagttaggctatgaggaaatatattgcttgaagagttcttctgctgtgtgatattggaggattcggcgatatttgtggttaatggcatcagttgcctgttgaacataagcttttgacttgtctttcatgctcttgcccttagggaagaattgacgcaaaagaccattgcagttctcattggtgcccctttcccatggagaatatgggtgagcaaagtaaatctggcagcccttgatcttggtcatatccgcaaactcagagccattgtcaaacgtgattgatttaaaccaggcaggatgtctgtcaatctccttttgaagcagcctttggcatgtgcttgcccgatagtcaggaatcttgataactacttcaaagcgtgtggttctttcagtcaaagtcattaaagcaggctgattcttgcgtctgacgcctttaaccagatctccttcccagtgcagcggagcttttctgtcttcaacctccttaggacgctgttcaatggaattgccaagatgcttcttgtgcaaagcgtgaccgccatggctgtgatgacgcttgttcctgcgtcttttgagcttcataggcagatcaatattgcttatgtccagcaagccctgatcaatatagcgatagacggttggtgtgctgggacaagggtagcctggcatagtccttttgaattcaccaacgaactcatcgatgctggtggcatcaaatttagctttaaagcgtctggagagcattctcaaaaagacagcataatgcttcaatggattgcgctgatagcagtttttgcgacgcttctcataataaatctgtgcagtatcagcgtaatagtgctcatacaataaatagctgctgtctctttgcaggacacttccgcgtttgatttcgcgactgattgtcgacttatggcagccgacttcttgagcgataacagtacgggaagttatgccggaatccagcattgcttgaatttgtccacgttgtacgctggttaattgatgatagtgcttagaaatgctagaatttgaattggtcataaagatcttcctttcttgatttttcgtcacttcaagtttaggtcttcatggcctttttgtttaacacttagtgttgcacttcaattttaaatccgggaattatttttttagttaaatttgatgtaatatcagacaataaagaaatttttcctactccacgcatcccgtaaataatcgatatttgataacatcttcaaatgattcaactacattttcgactactttgtttctccctaaatatatttggggaactttaccaaagttagtatcaaatagatttttggcttctatagtttttcctccattttaaatttcttcagattttttgattttattttagatctaattacataataaaaagtaagctattacacttgctaaaatgaaatctaaactatttattacattgcttctcctattatgaaatgcttttaatgtctaattttgcttttttccatatcccagcaggtccaagccagcaataaaataatcagtacaataatagcataagcgaaaatcttggcatcttgtttaggcattatattaaatgaaacaaaggttgccggcaaattatataagttcaagaaaattaaaataatcgagctgatccagcctaagaccgaccagcttctcctatttttgaattgccccatcattcttttatcatcagtcataattaataatggaacaatcgaaaatgggacagcaaaagctaagaagacttgtgaattttctaaaagcatgttgagagcaaagtgctgctgagaaattgtgtcgttagctgtcataacaacgcaaatgataactggaattacggataatagccgagtaaataatcgtctcgcccaaagtggcatcttcaagtgaatgaagccttccattacaatctgaccagttaaagtccctgtaatagtagaattttgtcctgaagcaagaagtgctatggcaaagagaactgataaaattccagttttagctactgaaatcaaaattggattacttagcattgcagtattgcttaaagcatcataaagtccaaaaaatgaactatctttaaccgctccacttttaaaaacagctgctcccataattagcaaaagcacgttaacaaagaatgctagaataagttgaatatttgaatcccaagtagtaaaacgaactgcatttttgacatcatctggatcatgatgatttatctttcttgtttggcaaattgaagaatgcaaataaaagttatgcggcatcacagtggcaccaataatacctaaactacctgttaacggggaaagcccattaaccacgggatgttgtgcaactagttcgggactcggaaaaacagacaagaagatcttactccaattgggctctgctaacatgacttgataggcaaaaacaaataaaatcaccataatcaaacatgaaatcaaagcctctatttttctgaaaccaacctttgacaataataatagtagaaacacatcaaaaatagtgataaatgttgctataactagtggaattttaaataaaaggtttaaggcaatagctgcaccaataacttccgccacatctgttgccataattgctaattcaattacaatccaaagaataaagctcaatctcttactagttctagcacgaattgcctgcgctaaatccatttgcgtaacaattcctaatttagccgacatatattgcaacagcatggccattaaactggaaattaaaatagtagaaatcagtaaaaagttaaagctctgtccaccattgattgaagcagcccaattgcctgggtccatataacctacagcaactaatgcgccaggtcccgtataagcaaaaagcattctaaagaaattcttagttttaggaaccgcaatcgtactattaatctcagctagcgatttaccattagcatatgaaataaaactatgattttccatcaatggtgctcctatccatggattcctagtgtcattcgagcaatacgcgacatcatatttggattccattgcggataccagaccagtttaatttgacaatcatcgatttccgcaacgctctctgctgccttggtaatttcgttattcagccattcactcaaaggacatcccataatagttagtgtcatcgtaatctggcaaagatgatcatttacctcaatgccataaatcaagcctaagtcaacaatatcaacttgcaattctggatcaattacatcttttaatgcctggtaaacatctttttcttgatcagataaattttctatttctaacattaaccaattgctccttccatttggaagctgatcaatcgattaagctcaacagcgtattccattggcagctgcttggtgaacggttcaacaaatcccataataatcatttcagtggcttttctttctgaaataccgcgactttccaaataatacaattgatcttcagaaattttagaaactgttgcctcatgttccatcgccacatttgagttttcaatcgcattagttgggatggtatctgaagatgattgatcatccataataatcgtgtcacattcaacatgcgccttagaaccgtccgactttttagaaaacttaacacttcctcgataatcagttgagccaccgcctttggcaattgacttagaaacaattgagctagaagtgttaggggcattatgaaacatccctgctccagaatcttgatgaatcccgtggtgtgccactgcaatcgaaagcatggtaccacgtgctccttcaccatttagataaacgctcggatatttcatggtcaccttggcacctaaatttccgtcaacccattccatcgtagcatgcttgccagcaacggctcttttagtttccaaactataaacattatcagaccagttttggatagttgtataacggcaatatgcattgtccaacacatttacttcaaccacagccgcatgaagagagtcagatgaatattgtggtgcagtacatccctcaacataatcaaggtgtgcatcttgatcaacgataatcaaagttctttcgaattgaccagaattttccgcatttaatctaaagtaagcttgaacaggtgcagggacttgaactcccttaggtacataaataaaagtgccacctgaccaaacagcacagtttaaggcagaaaacttatttaaatcaattggaactaatttgccaaaatatttttttaataaatctggatattcctgcaatgcagtatcagtatctgtaaagataatccctaatttatcaaattgctctttcatcttgtgataaaccatctcagattcatactgggcagctgaaccagctaaatattttctttctgcttgtggtacacctaagcgttcaaaagtatccttaatatcctgtggtacatcattccaatcacgatattttttatcagtcattttttgataataaagcatatcatctaagtctaaacccgaaagatcaggaccaaaactaggcattggcattttttcataaatatggaaggcctttaatcgataatctaacatccacttgggctcatgcttttcagccgaaatttgtctaattacatcttctgttaaaccatgtcccgttgaaaattttggttttacattatcatgaaagccgaattgataatcttcatctttaactatttcttctgctttagtcattatcctcatcctcgttttctttaccaagtaatgctcgatctaatccccaccaagccaaggtggcacatttaatccgcgccgggaattccataatacttatcaagacttgagcgtcttctagtttttgcatgtcttgttcactacgttttttgccagctgctaagtctgaaaatatcctagaaaaactaatagcctgttcaatattttttccttttaccaattgggtcatcatactagctgaagccttactaatagtgcatccttccccatcaaaagcaatatctttaatttgatcattctcaaccaaaatagttaagtgaatcttatcaccacaagttggattataaacagtcgtttcattagtataattagcaagttgtccaaaattgcgtggagtttgagcatgatcgagaataactgctttatacaaactttttaatttatctaagctcaccgaaaaactcctttgcttcttgaattgaactaaccaattgatcaatatcattttttgtattatagattgagaaactagcacgtacagttgattctgtcttaaggctttccatcaatggttgtgcgcaatgatgccctgctctaacttctacaccatttaaatcaagtgctgttgctaaatcatgtggatgaatttttcttaaattaaaagaaatcacaccagtacgattactgcagtcttttggaccatacaccactaagtcatctatttttgataattcttttaaagcatatgctgttaaactatcctcatgtttttgaattaaagttaaatctaactttcctaaataatctattgcggcacctacgccgatcacgccagaaatattcggagttcctgcttcaaacttttgaggcacaggtgcccaggtagctccttttctagttacatttgtaatcatttcaccaccaaaacgataaggcggcatttgttctaacagagcttttttgccataaagcacacctactccagttggcgcaaacattttatgtcctgaaaatgcataaaagtcagcatctaaatcagtcacattaaccggaaagtgtccgacggcttgagcgccatctactacaacaatcgcgccatttttatgagctaagcttgttaaagccgcaataggattaattgtccccaaaacattgcttacatgagtaatcgctacaattttagtttttgtagtaattttactttttgcatcttccagatctaaacgaccattagcatcaatttcaataaactttaacttagcgttctttcttaaagcaatctgctgccaaggcaaaaaattgctatgatgttccataattgaaacaacaatttcatccccagcttggatattttgctcaccataagttgccgcaactaagttcaaactatctgtgcaaccactagtaaatacaatttcacttgcatttttggcaccaataaagtcagctactttttgacgggcattttcatatttttgtgtagcccttagccctaaagtatgaacaccgcggtgaacattagcgcgatcaaaattagtaaaatgttcaatctgtttttctacaactaacggcatttgactagttgctgcattatcaagatagatcaatttttcatcattaattttttgattaagaattggaaaatctgctttaattttcttaacgtctagtttgtccatcaattaattttttttccaaaatatcaatcatcttttgccgaacttccttattaggaattgcatcaagaacagcccctaagaacccgcgaattaccaatctttgagcttgatcatatggaataccacgactcattaaataattcatttgaatttgatcaacaggacccacactagccgcatgagcagcaataacatcattttcatcaattaaaagcagtgggttggcatctccatgtgcattatcagacatcattaaaactctattttgttgatcagccttagagccatgtgcaccatgaacaatctgaccaattccattaaaaattagttgagaattttcaagtaaaacaccacgttgatttatcaaaccagttgaatgtggcccgcggttggttactcggttgttaataccgactctttgatcaccagttgtaactgcaattgccttagaatccgcataactgccttcgccaattaattctgaatccaaatcgcctaaggtgttgcagtcattcataaaagcaattgcccattcaacatgtgcatcattttcaattcttgcacggcgattaaagtaaagcgttgtatccttatccatttcatcaagggatgaaaattcaacatgactacctggatgtgcaacgatttccaccattaagtttgcggatttaactgctttatcctcattttgaatttcttccaagaatttcacttgactgttatcctccgtaacaatcaataaatgtgaaatatatggatcttgcgtagggttcaaagtaactgtaattggttcggctaaaactgtatttttaggaatataaagaaataagcctgaatttaaatacgcataatgataagccgttaatttatcttcatcatttttaataacggaagctaatgcggatttaactaaatctggatattgctttattgctgtaaaaagatcgcataagatgattcccttatcgttaagaagatcatgattctctttttttataaaaaagtcaggttggttttgccacttaaaatcttctttagcaatcaacggccaatcttgataggaaaaacgctgcattttgggataagaaagtttatgcatcttttcaaaagaactagtccttaaatcagttaaccaggaaggctcgttgttttcctttgatgagacaagtatgttttctttgctcaacatttgacgttttcccccctaattttcatcaactaacttaatatgtaacccaagttcatcgcgaagacctgcatatccttctttttcaagttttttagctaaatctggtccaccgtctttaacaatacgtccatccatcatgacatgaaccacgtcaggcacaatataatcaagcaaacgctggtagtgtgtaatcattaaagcaccaaagttgtcaccgcgcatggcattaactccccgtgatacaactcttaaggcatcaatatctagacctgagtcgatttcatcaagaatgccaaaacttggtttaatcattaacatctgcaaaatttcgttacgtttcttttcaccgccagaaaagccctcattcagataacgctcggtcatggcttccttcatatctagcaaatccagatttttatctaattcattcaaaaaagtcatcactgaaatcggatcatcttttggtcggcgagcattaattgctacccgcaaaaattcagcattagtcacgccaggaacttctgctggatactgcatagctaaaaataatccttttctagcgcgttcatcaactggcatgttaataatgctttcaccgtttagcaaaatatcgccttgcgttatgtgatagcgaggattccccatgatagtctcagataaagttgattttcctgttccattaggtcccataattgcatgaatttcacctgtcttgagagttaggttcacgcctttaagaatctttttactcgtttttttatctttgtcttcaacttctacatgtaaatccttgatctctaaagttgccatttaaatcctctttttctacatttggtattgctgcttaactatcagatacaacatatagataatataacgcaaaaaaaattttattttcagtcttgacttttaacctaacatgtttgcgtagtcatgaactggcacttgaagtgttaaatcagaaattggaaatgtaacacaagtgttgacatagttgtattcactatcggctgcacgacgtccaggaaatggaataaatacttttccattaactactcttgaacgacatgcaccacaaacgcctgagcgacatgatgaaggggcaataatacctgctctttccattgccaccagcaaactttcatcacttcttgctggaataacttgtatttgatcacgggttttaactgtcatgttgaaagtcttattctttgcttcctcaggataattcttgaaaaagtatggatttactgaaccggacatttcttgtcttacttgccctggacgaagatctaactttttaatttcttgatttacaaaatgaatcatcgcagctggaccactcatataaatagaataattcttatctgctggagcatatttttcaatgatggcctgattgataaagccatgttcatatccttctacttcttcatcacttaatatgttaacgaccttgaccttatcagttttggcagcaattctatctaattcatcacccaacaaaatatggttgtgcgttctacttccatataaaataatcaaatttgcatcaattgtgccatcagcaattgcaccagccattgagtaaaatggtgtaataccgctgccaccagcaataatggtcttcttgtctcttaatggttcatagaataattgaccagcaggacccgaagcagctacttcagtgccaaccttccaattctcccaaatataaggagttacatacccatttttgactaacttaattgtgagcatatattcgccagaaagcgcctgcttaggtgtgcttgaaatggcataagcacgtgtacaataacttttaccaatatgaagttttaaagaaatatattgacctgcttggaaatatgcaagtttgctggtaccttttgattcatctggtacaaatacaaagctcttagcatcgtcacggtcaataatcttagtgattttcaaatattgcgtttcaggatgaagctcctcttcaagaatgttcatcggatattttttaggcaactctgcatccgaagcattttgaatttcatgttttcgctcattttgaagcttctttaaatcaataattcccttaatctcttcaaatttattcatgatctgctcccatattattaatatcactaacagctatttttgctgcagttaaaccagtagtgtatgaaacattgtaaccatcacacataaatccatgaccaccgcagaaatataaatgtggcagtggatttacaacgttctttaaatccattgatctaccaataatttgatcccatggtgcacaatgatagccataaatttcaccatcaggtgttcccatatagcgagcaaatgttggtggtgcagcaattgcaatctcttctatagaatcactaattttaatacctgttgcctgttcatactcatcaatagcatttttagctattttaactttaagtttttcataatctttgggtttaacattatcccaaacaccatcatcaactaatttagtaatgtagcaaacactaattcctttaggagaagcatttggaatgacagtatttaagcaattcatgatcataaaatcatttttatccatagttttacaattttcatattgttttctagtatcacctgttgaagcaatgaacacactatagtcatttattccaagttctcgacaggatttatttagcccaagatacaccaaaaaggcactggttcctaatttatgtgagtttgcatattttaaagcatactcaggaatacacttttgatccatcatgttgccataaactgcgtgaggagtaattccacaaataacttccttagcaaaaactttttcacctttaatttgcacaccaacagcttgaccattttcaactaagattttttctacagttgtactcagccaaacatcaccaccattatcataaattacttgtgccaatgctgttgacatatcatgacttcttctttgaggaatataggcatcgttttctacataagtagctaacatagtggcaaaatacggaaattcaaattcatcagtgggaatatcaatgtaacaccaatatgctccaagaatttgttgagcttttttaggaagttttaatttgttaagcacatcatcccaactcttagtagcatactcgataaaagctggatatttttttataacttcttttttatcctttccatctgctatttctgctaacgcattcatactttgctcacacagatcaaaaagcttttccatcttttctgaagtacctggtacatatttttccatcgcattaataaaattttctctaccagctggcatcttaacatcaaatccgtctttaccataaataatatagcgataagtatctggtaattcttgcatttttacgttggcacctaaccagtcatacatttttcgtactgcacgcggattatcagcatgaccatattcacataattcatgcaaggctacttcaaactcaaatctgccgcgaataaaactggttgctgctccaccagccagattatgtctttcaatcaatagagtttttttgcccattctagcagaacttgcggcggccattaagccgccattgccagccccaactacgataacatcatatttttcagccattttttaaccctttcgttttcaaatgattacgttttcattataattaatatgaattaaaaaaaggatcaaagtaaagaaaaacaaagttattttatataaactagccgttggcttctggtcctaccagtgcaaaggagaataatatgaaatttcacccaataaatgtacccactgcaacagatttattcttcgttaatcaattaaaaacagcaatcttaacaggaaagtttaacctcggcgataaattacccagtgaaagagttttacaagaacaacttcaagtaagtcgaactgtgatcaattccggattaaaaaaattagcggcattacattttatagaaattcgtcctagatatggggcttttgtagcagattatcgtgtcgatggcgatttgcaaacaatgaacgaaattattaatttctacgggggacattaccgaatttcacttttaaattcgatttttgaaatcaggaaactaattgaaaatgatgttgttcgcttagattgtatagaacaggatgaacaatgcctgcaatcagctatttcaaatatgcaaaatcttgccaaagccaccaattccaaggacgctgcacaagaaatatttgcttatgtacatagtttagccttggcctccaagaattatgtttatcctttgcttatcaataactttaaatcaatctatttaactttaggtgaatggatctgtaatgaagtcgatgttaattctatttctgaagagaatctaaaattaattaaattaatcaaatcaggagataaaaatatagcaattgcttataataacaaactgattaattggagttacgagattttaactaagcaataaaaaaacggtcgatttgcttttcgaccatttttacgcacgttttgcgcgcgattatttatttaaaacacgcatggtgctagttaaatcgttttagttaataaaaaagtccaatcttgttagactcgacttgtaaatagtaataatagaaaagagtctgatctgattgaactgccttaagcttaagcgttttagccaccatttacaagttagttttaaagatttagtgataatttgtcggcactggtatcgtttgtatgcaccggctgagtttactcatcggcgaaatattgatcaaattaaaactacggacagtctgattttggctttacttatctggcaagctaagacaggaattgaatcacaaagaagattctgtgaatgtttcaattgtttatcacactcacgttttaatcggcgttcacgtcagctattgcaattgatttatcagatacggcaagaaatgaataaaaaggttgacctgaatggacatttcttgatcattgacagctttccggtacctgtttgccaaccaattcgcaactatcgtgctaaaatttttcgcggttatgccaacattggttataaggccaccaagaaaatttacttctatggtttcaaagttcatgccattgttagcgatgacggttacattcttgattatgtcgtaacaaaagcatcagttcatgatgccaaggagacagttgaactgctggaaaatgcccatccatctaattactatcttcttggcgacgaaggctatttaggcaaagaactgcatcaacagctaaaacaaatgggttacgaactttggacaccatatcgtaaaaatatgacaggagctaaaaagcacaatgatcatcaattgatggctattcgcagaacaattgaaagcgacttttcgcttctgacctattacaatgccgagaacaatcgagcacgtagtctgataggctttcaaagccggttggaaattgcaattttagcttataatttggcttattgtctagaaagatttaactagcaccacgcgtatttaaaacatattttgtagatctaccctcaccaattctctcaacataaccttgctttgttagttgtttaagtagatttaaaacttttgttttaccaaaattacttgctcgactaatttgtgtagaagtatttgcaccctcgcgaatggttctaaatactttcttttcatcatcgcttaaatcatcagtaataaattttagaattggtaaaattatttttattgaattttcaaagatctcgaactgtggttgaactaaacttccttgataggaatctttaattctctttattcctgtaccaaattgttcaattaaacccaatctaaaaaagacattagccacaataggatttcttaaaatagaaatttgacctgacagatactcatctttactcaagttatgaggtaatcctcctggagaaactacttctattcgattatcaaacatagaaactttaatttgagcattaatattccaagtcctatgaaccaaggcattagctattgcttcacgaaaagcttcttcaggaatttgacttataacgttacgagtaacaccatgtatttcctcacgctgataatactgccgatatttttgaatagtttggtcatactctttaagaattgattcattctcatagtttgccctatccagcataatattaatattttcaccaaagcgaacgacatcaatcccacgataatgatttttatctgctaataattcacccgcattagtatatccggcattcttctgttctagattaagagtaattagcacatcggatgtcaatttattaattcctagtttttcttttagtgccatttctaaaatattaaacgatagattttgatttgcagctgttaaactgtcataagtcttattttcgccaatcaaaattagttgtgataattctgttctatccacttcaattgaagcactatcatttcttttataagcttttgctttatataaatatggtggattatcgccctgttttaccgtcaacgtgactacattagttttatcatcaatctctaaattataatctggatgtggctggatggaatcatttattttattctctacatttaaacaaaaatcaattggattttttacaccaataattgttccatcatcctttataccaaatttaacttctcctgtaccataatttgcatacgcactaaccgtttttaaaaatgtgtttgtaagattctctttaaattctaaattctttgtttctctcacttaagtcaccttgccaatctattttatctacaattatactctttcgcacacaaaaaaacggtcgattttattttcgaccgtttttacgcacgctttgcgcgattatttatttttcgttcacgataatcaatgacttaattgcttcacgattgctcattgcttcgtatgcttcttggatatgatctaaatcaaaactcttagtaaatacttttcctgggttaatttttccatcaagaacagcttgtaaaagaacttctttatcaggcttagttactgaagcaataccaccgcgaagaccgacatttttccagaataattggtttgacttaggctctgcatgtggtacacctactctaccgattaccgcacctggacgagcaatttgaccagcttgttcaattgcactttcagcacctacacactctaagaatgcatcagcaccagcattttccttagttaaagccagtacatctttaactgcttgatcatcacgacttgaaacaatgtcagttgcaccaaattcttttcctaattgtgcacgatcatcgtggtgggataaaagaatgattttttcagcgcccaacaacttagcaccaataacaccggcaagaccaacggcaccatcaccgataactgcaacagtatcgcccttcttaacttcagcgtttaatgctgcgtggtaaccagttgccataacatctgacaatgtttgaagggatgccaattgatcatcagtataatctcctggcttaccgggaatcttaactaatccagagtttgctggttcatatttcataaattcggcttgatagccaccgttagtacccggcttcaaattcaagcaattgccttcaaaaccattaatacatgcaacacaatgaccatatccatgagtaaatggtacgagaacaaaatcatttggtttaatattagttacctcatcactaacttcttcaacgacaccaattgcctcatggccaattaaagacccactttcacgatcagcaattcctctaaaccaccataagtctgaaccacaaacacttgcacgtataacacgaataattgcttgattttcaccatcgatttttggctttggaacttctcttacttcaactttacctggttctacaaaaactgctgctttcatattatttctccttactatcgtttactttatatacatagtctaatcaaaacagactgtctataaaattactaatattaaatgctactattcaaaaaacgtatagtaatttcatttatgaaaaagaaccgcttgcttaaaacaaacggttctaactattagttacttattaatcttcatcagtattttggtgctcttgactgtcatttttttctttttcataatccttgtcatgatctttttcatcatcttcagtctcagtctttataatcttctgatttttagcatcaatttcaacttcggttttcttacctccatcttcaaattctactttccagattggctgatcatcatccatttctaatgaccattcaacaggttgacctgatacctgagtttgagccaattgagtagcttgctctcgagtcatcatattattaagatctaatgcttgcgcctcatcatctgaatctaatttttcagattcagcttttaaaatattgccattacttgcatcaatcttaactttgtattcattttgtgaatcaaaaccttcaatttcatacacatatgaattcttcttttgctctagttcaatctccttaattgattttgagccatacttttcataaaacttattaactgcatcttcttgagaaagattaatacttgcagtacctgtattactttgattttgttctgtgttattgctttgactctgttgcgtttgagtgccagtagaagcattagcctggttaatcgccaataaacttgcgccacccgctgctaagcctaatgcagctgctgccaatgatacttttttaatgttaaactttttcataattgaattcctcgcttttcgtattaattaactttgtacacttagtttacgaaaaaaggaacctttaaaaaccaagatttaatgtagatcaaatgaaattttcttcattttagagttttttctaattaaattgatttttcaataaatatcctatacgcgtggtgctagttaaatcgttctagacaatatgccatattataagctaaaatagctatttctagccgctgttgaaagcctactggacttcttgctcgattattctcagcgttgtaataactaagcaaagaaaagtcgctttcaatgcttcttctaattgccatcaattgatgatcattatgccttctagctccttgcatatttttacgatatggcgtccaaagcacatatcccatgtgctttagattagtagctagatttttgcttaaataaccttcatctcctaaaagataatggttggctggatgagcattgatcatcaattctactgtctctttggcatcatgtactgacgctttagtaactgcatagtcaagcagatagccatcatcgcttactattgcgtggaccttgaagccataataatagactttcttggttgctttataaccaatatcagctacgccccgaaagatcttgacacgataattgcgaacaggctggcaaactggcactgggaaactatcaataatcaaaaattctccagctgtctttacttcttgattccaagcctgacggatacaacgaattagaggcaagagcattcgagctcgacggttaaaacgagaatgagataagccaacgaagaatttacagaatcttcgttgagattcaattccaatttcagtttgccaaatgagcatcgctaagatagaactattaggaagcttggtctgatcaacatttttacgatgtttaagtccatcaggcgcataaagcttatacagcgagcgacaaatcacatttaaccgattaaaactaacttgtaaatggtgagaaaaacgcttaagcttgagatagttcaattagatcagactcttttctatttaaattacttacaacttgagtctagtctaattggacttttttattaactaaaacgatttaactagcaccacgcgtatcctataaatttgtctcttttttgacttgttctagagcctttacctgtgcttgatctaagggacgatactcattcatcttattaagtaattcagttaatttgttggtattcattttatcactctcgtgttcattagttgcttttgttaattcattttattatagaaccctcaataatcactaaaaggaatttcaaaaagatttagcgtattttatcacctttggaatttttctaattaaaaaagttattgacaaatttagaaagcggttttattctaagaatgaattaaataatgttcttcgaggcagggtgaaattcccgaccggcggtaaagtccgcaacccgcataagcggttgaatcctttaatggtaccgatagttacagtctagatggaagaagaataattttgctgtgctcttttctattttgatagtaggaactgtacttaaattattttttgaatgttagttagaacctcgaggtaattcttcgaggttctttttttgttctgttaggaagtgaaagaaatggaaaacagtgatgaagcatatatgcaattagctatccaagaagcgaaaaaaggactctatcaaacatggaagaaccccatggttggagctgtcatcgttaaagatggcaatatcttggctacaggtcatcatattcgttatggttattatcatgctgagcgtgatgctatttcaaaactaactccagaacaattatttaattcaaccctatacgttactctagaaccatgcagtcattatggtaagcagccaccctgctctgatttaattgtctctagcaaaattaaacgagtggtaattgcgcaagtagatccacatcaactagtaacgggtaaaggtattgccaagttaaggcaacacaatattcaagtaacggttggcgtattagaagatcaagcaaagaagctaaacaagttttatacttacttctaccaacataatcatccatggataacgttgaaacaggcggtcagcttagattatcgaattaatgaggctaaaaatattcgcactcaaataacaaatgaaactgtttatcagcgagtacatagagagcgcgcaaattatcaagccatcatgattggatcaaatactgccattatcgataatcctagtttactgactactgtcactacggattttccacccattcgaataatagtagatcgacgtggtagattactgaatcatttaaatattaagttattaacggataagttaagtccaacttggatttttactcaaaatacaagcttagctaagactccacataatgaaaatatctcaatttttttgatgaaaaacgcttcaatcaccgaagtcataaaaaaactgaccaatgaagagatccagtcggtttatgttgaaggtggtcctaccctagctaatgccttgctagccgaaggtcaagtaaacaatttaattacttacataagtccaattttacttggtcaaaaaggaaagctaggaatttcacccagctccaaaacaactttacataatttacgtgctgaaaagttggatgataattttagaattgaaggtgaaattaatgtttagtggtctagtacgcggcgacgcacgaattgctgctattgataaaaacgatgaaactattgttatgactgttgcttgccagcccgactttactaaaaacttgcaaattggcgattcaattgcagttaatggaacctgtttaactgttgagcaatacactgatacttcttttgtagtaacgatgatgccacaaacttatcagaaaactacttttaagaatttggatatcaatgcccaattaaatgttgaacgttcactacaggtcggacaaagattagaaggtcatctagttactggacatattgatgatattgccaaagttacggaaatcaggactaacgaaaatgctattgaagtttggtttgcctttcctactcgcttaaaaaatcagattgtagcacaaggtagtattgcaattaatggcgtatcgctaacagtaatggatacacatgataatgttttctcagttggattaattcctcatacacaagatgaaacaaatttaagtaagttaaatgtcggctcagaagtaaatattgagactgatatcttaagtaaatatgtcgctaaaaatttagaaaagagaatttaaaatggacgtaaaaaaaattcaaaatgcaattcaatggatgaaaaatggtggtttagtgattgttgctgatgatgaagatcgtgaatctgaaggtgatatgatcggcttagggtctaaagttactcctgaaaatgttaactttatgaccaaacatgctcgtggcttactttgcacccctgtaagcaaaacaattgcccaacgtttaaatttctaccaaatggaacaaaataatactgatccatatggtacagcttttacaatcagtgttgattacaaaaccaccactactggtatttctgcttatgatcgtgcggcaactatcaaggcaattgctgatcctacttccaagccagaagacttctttagaccaggtcactgttttccattagtcgctaaaggtgatcaaatcaagaatcgtaatggtcacacagaagcttctattgccttagctcatcttgctggcgaaccagaagttgcatatatttgtgaagttatgaaagctgatggccatatggctcgtcgtccccaactgaaagaaattgctaaagaatatcacttaccatttttaacaattgcagaactacaagaatatattaatagtcctgtgagtaaacgctcagagtttgtaaattttcccactaaatatggcaatttcaaaattaaggctttcgccaatgaaaacttagctattattaaaggaaagattgatcctaaaaagccagttttagtacgtcttcattcagaatgccttactggtgatacgtttggctcaatgcgctgcgattgcggtgatcaattacatactgccatgaagcaaatgaataaaaatggtagtggcataattctttatttacgacaagaaggacgtggaattggattaattaacaaattaaaagcttatggtttacaggaccaaggttatgacacttatgaagcaaatgaaattttaggttttaagccagatgaacgaaattatattattgctgccaagattttaaaagatctaggtattagtcatatcaatttgcttactaataatcctgataaaattgatcaactagaaaataacggtattactattgaaaaaagaattcccttggaaattcctgctaataaggtaaatcatgactatttagaaactaaacgagataaattccatcatttattagaagcactatagtgaggaacacagaaatgaatatttatgaaggaaattttaaaaacaataattatcacgttgcaattgtagcatccaagtttaacgaaaccgttacccatcatttagttgacggtgctattgctactttaaagcaatttggagtacttgaagatcagatcgatatctattgggtcccaggtgcttttgaaattggttttactgctaataagcttctcaattcaaataactacgatggtattatgactttaggcgctgtcattaaaggtgagactgatcattacagcatgattattcagaatgttacaaacgcaattatgcagatgaatcttaaagcagaagtcccaataacttttggtattttaaccactgagaatattgatcaagccttgcaacgatccggcttaaaagctggcaatgaaggttcctctactgctcagagtctattagaaatgatttcgctaaataaacaaataaagtaatagagtagagggagattaattctcgcccctctcattgcaccggacgtacggttccgtatccggcgctacgtttgtaatcatctacgagataaatagtattctagcggatcgaccaagcctgggcgatccgctttgcttatgcccaatacttttgggctaagcaaaaagttaacaacatgtccggtactgcgtttataccaacctaatcgcgtattagctactttatgaatatcttcgtcgctaaaattgcactttaatgccttgttaatccgcattaaattagtgtatattcttcttggcagtttccattgtttaatgattactacccgtatcttatggcgcagccattgactgaatttaaatagaaagtatttcataccgccaattttaaagtagttaatccaacctctgaccacttgatttaccttagtaaagactaacgatagaggttgagcagctgctttcctgcgacaaagaagctctctaatcttgttataaagcttggacaggattggcgaaagcggtccgccttgaggcacgccaatcttattgggcttaaccaaaccatcttccatgataccggattttaagaatgaccgaatcaaatggagggtggttttgtcatttactcgttctctaattattgaaattaatttatcatgattgaccgtgtcaaaatatttctcaatatctaaatcaattacccattgatatccatcatcttcatgattgcgtatttaatttctgcttgatgctttctgaaatagctatcaagttcttcaaccattcttttatctactcccggagcacctttattaatcttgactctatgaatcgcttctttaagattgctctgacttagaatctgttcaattaatttcatctcgtaatatctccatttctacttgtaaatttattcagaatcatcccaattgctttcaccatcaaagagttacgttctctttgtgctaggctatcctcttattcggactatctgaacattgcttatagcgggatatgctcttacaaacattaggtccttcgctccagtctcattacaagactttcaacactactatgacctcagctgacttcttgcgactaacctttttcgaccaggcttacgatcgctgatgttaaagcttgctcagcttgcctgtccgcaagatctctcggggtaagacattcatctttgattttccactgcctcctggtttaccgtcttgactttacgtttgtcttttggacttcgacttgtatcgcagccttatccgccatttggcctaaccaggtttctgtacgtaggctcggaaaactcgctagccacttccttcacccatagcgtcaccgctatcggcttgtggttcactacacttggcgacaaatacccgtggtccaaactttcattggattagatgaaatgtcatgcccgacacacaagtaaaaagccaccgaagcactaatacgcttggtgactcaaaggtctaattataagtttcttctactagtagctcatatggctttagcaagtaggtagctcccgtttctttgataggataattttgcacaacaatttttttgcgggaaatatgataattaacttaaacttcccacacgcaaaattgcttgtttcattgtgattctgcgtgttttgacaaatataaaaggcacaagtccttttcattgctataattatattgaccaaaacataatttatttgcatgaaaggcttgtgccaatgtctattttaccatctcctgaccaacaaaatgaacaactattttcaaactcaatcatcagcttcatcaagaagtttcaggtgatcaagctgttgagaaaatgtggcttccgcaaggaaaaaggcattagcctgttcagcttgtttctttacgttttaagcaatgtctttcgtgaccgcagcttatatatgcagctgaaaatggatcattttcaagaaaatttttccaagaactcatattaccgttttatgcgcaacgttcacgtcaattggctccacttcaccacacttctgtctgcgcaaatcattaataaccacttgcgatctttgacttcagaaaaacgggctgattgctttgttgtcgatgattcctacttctctaggaccggcttcaagaaaacagaattagtcgccaaagtttttgaccatgtatcaatgacttacaagaaaggttttcgcatgatgaccctgggctggactgatggagcttctttcatgccaatcaattcagtgctgctgtcttctcagaagctacagaatatgattggcgaaaataaagtttttgatcagcgcaccattgctggccaaagacgtatgcttgcccggactaaaggcacagacgtgatggttaatttaatcgaccaagctatgaaagcaggtcatcaagccaagtacgtgctgtttgacagctggttctcaaatccacatcaaatcgtccagctcaagcaaaggaagctggatgtgattgccatggttaaggttagctccaaaatcaaatatgaatttgagggagaacgcaaaaacatcaaacagatttatcgcagctgtaaaaagcgatgcggccgttctcgctacctgctgtcaatcccagtcaaagtcggacgccaggacaaagacggtgctaaaatagatgcacggattgtctgcgttagaaaccgtgccaatcgcaaggattggctggcaatcatttgtaccgacatgtcgcttagcgaagatgaaattatccgcaactacggcaagcgttgggatattgaggtttttttcaaaacttgcaaaagttatctaaaactaagtacggaatatcatggcctgtcttacgatgctttgaccgctcatgttgccatagtttttactcgctacatgcttatgtcagttgccaagcgggacgatgaagatgaacgcacgctaggcgagctgttctattgcatgattgatgagctggcggacattacttttagccattccttgcaattgattactgatgcaatgctggccagcgtaaagcaagtctttcatgccagtgaagcacaaatagctgaattcacggctgactttatcaatcgtttacccaaatacatgcaaaaattgttaaagaaaactagcaaaaataatatagaagcctaaagccaagcaagatcaagagattactggcttatttagtgtgggaagtttaagtaattaattcttcctgaattgtcaaattaagtgcaacagttaggttatgaagagatatattgcttgaagagttcttctgctgtctgatattggaggattcggcgatatttgtggttaatggcattggttgcctgttgaacataagcttttgacttgtctttcatgtgcttgcccgatagtcaggaatcttgataactacttcaaagcgtgtggttctttcagttaaagtcattaaagcaggctgattcttgtgcaaagcgtgaccgccatggctgtgatgacgcttgttcctgcgtcttttgagcttcataggcagatcatgtccaccaagccctgatcaatataacgatagacagtagacgtgctaggacaaggatagcctggcatagtccttttgaattcaccaacgaattcatcaatgctggtggcatcaaatttagctttgaagcgtcttgagaacattcttaaaaagacagcataatgcttcaatgaattgcgctgatagcagtttttgcgacgcttctcataataaatctgtgcagtatcagcgtaatagtgctcatacaacaaatagctgctgtctctttgcaggacgcttccgcgtttgatttcgcgactgattgtcgatttatgacagccaacttcttgagcgatgacagtacgggaagttataccagaatccagcattgcctgaatctgaccacgttgtacgctagttaattgatgatagtgtttagaaatgctagaatttgaattggtcatgaagatcttcctttcttgatttttcgtcaattcaagtttaggtcttcatggcctttttgtttaacacttagtgttgcacttcaattttaaatccaggactcatatttttttcactgtttttatttttttgtcttgatcgaatatagcttgagcaatatttttggtaaaatcattcatgaaggagttcctctttctgtatgttgttttttgttcaaaccaatcatacgagaaaggagctcctttttctaatgtttagggaataaaatttaaggaatcgtccatccttacacaaactattttacagtctctaaaaacagtatctttcaactataattactaaaagatactgtttctttataaaatctttcctaataaaaaactattccatcatagcgaccaatgtaattaatgctgcatcgtaataattcgtatcagtcaaacgattagtaaaaacatactgttgtgaaacaaataaattatcaaattccggtttctttaattgttgcactgcaaaaaagatcggagcactaatactcggtgaagcataattgtttaacgctttaccattcaattgatagccagcagtcacttgtttttgcttgctgaaaaagcgtaacattttagtaataattttctttgctcgtgcatctttgctagtagctaaaaataatggtacgcgacaagcattgccagaataatcaccatcattttttccagctacttcattggctttagctggtctaacaccttttttactaatccaagcaaaatctggaactaagccagaagaatgttgcttgctcaattgatatagttttgtcagcattaccttcttgatcgttaaccattgagaattaccagtcaactgataaaaatcatcaaagtacgtcggtaacacgtcagaggttcgcattaagtaataatacttcgatttcttattagcccaatcaccaacagtcagcgtctgagtagtcgaattataatcataacgtaagatatcagctaataatagcttagcctgctgcaagtacttgggttcgttccagagttttcccgctttaatcaaactttctgcaatgtataaatcgccatcagttgcattagtagaataaacttttttatccacttgcttccatgacattaattcagtttgttgatcatcgatagtcaaccgattagccaggtaaaaccgatataaccgttgaaaatcttcttttttagcccaccccttttcaccagccatagcagaaatcaacatgccatagccttgaccttcagacaagcttgtgcgtggtgcagcttttatccaagtttttccatcactttcttcaaccacataatcttctttccattgacggtacaaattacgatgcaaggtgcggttattactaccacgaacataaaacatgatcgcgataaaaagcccaatagtcagtaagatcaaaattggggtaatcctgtttttgttttttaacatcaatctgtaaacctctttgtttttacccacttcgttgcttcgcgatggaaaagtctgtcagcaattgctgaccaaaccgcattaatcgatataatgataaacagttgtgagtatgtaaaatatgatgccacagcaagccaaagttgtctagttgtaacctgaccaaattgggtactggcagccacactgatttggagtacatagagtagaatcatcaacaaccaattaaaaagtaatacttgactgagcaatagattcccagcagtaaaagtaaatggcatctcaactgttggtacccaaatttttattactgcaaaaatcagattaacaatgaaaaagatatctgataagactactgctgcattaaaccagaaaaagatactggacatataaaaagtttcaagtttgacccgccaattactatggtcaaataaatgccgaaaattgttaattactacttcgtaattacctttagcccaccgcaagcgttgataataatagtcctttagcttctctggttcttgttgaaaggcttcagaattatgtgctagggcaattaatttaccagtgcccaaaatcgtaaatgacaaatcagtatcttcagttaaagcaccagaacgaaaaccacctaactcttttaaaaaagccgtcttaatcacaaagttagtgcccggaatgcgcccaattttgaataattgccaaactccgcagtgctgaattcgatgcgttaccacaatttccaagtttatacagctagtcaaaaagttttgctttgcattccgcgtcttattccgtccaaagctagccacataacgttctggatcttccaatacctttttgatcaagaaatacaaggcattttcttcaggcatcgcatcggcatcataaacgcataagtagtcgccgtggatcatcttaagcgcatcgttcaaaactcctgatttaccaccttcaccagttcttctgatcactttaaactgtcgtttctgatattcagtccgattgccaatggcttcagccaattccgctgttcgatcagtgcaattatcagcaaaaatcaaaatttcgactttatcttctggataattcaagttcagaattgctttgctagttttttgaataacagcttcttcattatgagccggtacaacaatagaaacggtaggataatactcaagtggtgtaattttagcaatttctttactgtgttttaaccaaaaaagcaccccgccccaaagcgtaactaacgaaaatagaatcgataaccaaattgaaatcaaggttagtatctgaaagccttcagtcatccaattctcctttctgactcttcattaatgcctgttcgatattgccataaattttataagcacagaaaaaaatcactaaaaatgcaattgcaaagattacagaaataatcacggacaaataataaaaccagttcattttgctatctttcctttatgtattcagtcacaatttcagtttccaattcacgacgcaaaaaacgaattacagctatcaaatcaggaaatctatcactattgtcgacattaatatggacactcgcatgttttagcgaaacaggaatcggcaactctaactcgcttaattttgtatcaacgatgtgattgaccttttttactaattcattggggatttctggcgaaattatcaaaaaagtcgcatctcccataaagtaaataaactcccccttaagtcgattatttttcaaaactttagtaatctgcttcaggatccgatcatgactattaggatgagcttccgcatactgcttatgttgatcccaactcacaatttgaacgttggaccataaatcgagttcgggatgctgctcaattttatgtagttcattctgataaaatttttccgcactatcgaaagttcttagctttaacctccggtcataaagcgaattataatgccgaatttcgtcattgcgattggtaaaaaagctccagcgaatgatgtgctgtctaatgacggtaactagactagcctcaataggataagcaatcaataataaaaatttttccttaactggcattactacatagcctaacagtaagaatcctgctccaatcgtggtaagaattaaaatcagccaagtaacatcgactcttgaaaagattaagccggttaaaatcgccaaaatcaaaatcattactaggccattaaagacattagctgggtataatcttgctagccataataacaatatcgggaaagtaacgctggcaagataagctaaacctgctaatttaaaatactttctggtcatttttataacatcatcctcaattatgctatttatttacaatttttcattgtaataatttaggaaactgtcaaatcttttgtgtaaatagatctttctcgtaaattgattttttaattatttatttaatcaaagtaggattctaaggtgtcctgaacctgaccaaagcctttatgaattcgattgaaataacggtcattgtagctcattgcctgaatgccaataaaagcatcaagcgactgttcagttggaaactctgccttaggcttagctttgcgcttgatcacattgttaaatgattcaatcatgttagtcgaataaattgaagctctgatctgcttgggatagttataaaagaccagcagatctggttctatgtctttcaagcttctgataacatggctgtaaaccttgccccatttggtatagaagtcatgcaggacagctgtggcttcttctttgtttgtctgttgatgcacctgtttgaattcgttcatgatcttttcacgatcgtcgacgcgtactttagcgcagatattgcgcatgacatgaaccaaacagcgttgaaaatgagctttaggataagtcctggccaaggctgttttcatgccaacaacaccatcagaaagaaaaagctcaacttgctttaagcctcgggatttcatgttttgaagcatatctgtccagacttcaatgttctcgctaggtgcaatgcagtagtcaatgacctccttgtgcccattaggcttgatgccaatggcaatatagactgcttcacgctcaaatgtttctcggcgcaaaggaaggtatgtcgcatccaaatagacgcagaaaaacttgtcgcttagcttgcgtttgtggtaagcctcaacctttggaatcatctgcttggaaatatttgatacctgagctggactgtaatggctgccatacatcttttcaattagatcggctatttccctggtggtcacgcccttggagtaaagcttgataatcatgctttccaagatatccgagtgctgcttgtagtcaggcagcgtgtgctgatgaaattgaccgttgcgatcccggggcacttgcacttcaattgggccaaattgcgtatcaactttgcggaaataagcaccatttctagagttgccagtattccagccatttctggcatagggatcatagcccagaaaggcagtcaattcagcttctaacaagttattaacagcctgttgtagctctttgcgcaataaatcatttattttgtctggattgaatagagcttgagcaaaatctttggtaaaatcattcatgaaggagttcttctttctgtatgtgtttttttgttcaaaccaatcatacgagaaaggaactcctttttctaatgtttaaagaaataaatttaaggaatcattcatccttacacaaactattttacagtctcatcttttagccaagagtattgtaatagacatataatacagtacaatgattattatcaattacataaaattgatgcaattaaaaattttaatcctgaaatttttccagtttatgacaaaaagcaaaaacaagtttattactttaataaagaagacttcaactatctggacgacacagatgccactttaaagaatctacccaattgggaaaaagactcgtacaagctgtattaagaatttcaaaatgattttgaaggcaagcgttttattgctcttccgtctaaaaaagatttaaacgagaatagactaatctttgattactgctgccagcttgaaaataatcaactaggcaatctgttacttgatagttttaatggaagacatgcttttcgaaaattcaaaaatacactttatcaaaatcatcttctagaagactatgaaaaatataaatatcaagccgagaagaaattagcaaccaactggtgcaaagaacataatttaatctaaaaaacactgacaggtcaatttgatctatcagtgttttttcatttatcgatcaatttttggtgcttcaccaatctgtgcttgcatcatccagattctcttttcaatatctgtatggcatgacgttaagatatcatttgagccatagtcgccttcctcgtcacttaccttaatcccttcttcataaaggtgctccaaataacgataaccagcaatgatagtcgcaaatctttctctagttgaaattccccattcgccaggatgagcttcgatcttagtatgatcaagcacttcctgtaagcttgaatatggtgaaccatcaatcgtgatcaatctttcggagatcagatcacgttgttcatccaactcgtccattaccttgtccaagtatgggtgcaatttcaaaaattcaggtccgcgcatataccagtgttgttggcgcacaaccatcattaattgagtggtgtcagccacagcttgatttaaaatttcttttgtttttggatacttcataaatttgcccctttcaccaaaaataacttactttataaaatatatcatagctgatgaaagtgattacagcaaattatttgattatcaaaaaagtgcctagaaaatcagcttcttttcctaaacacttaattatctatttctcttctttttccttgcagtggctcttgcacatacacttttgctcatcggccatcgggcaatgacaaatgccatctttaccagcgcaagggcaaccatcttggcatttcatcccattatgacaaaacttgttttccatttctgtcacctcgatgccatcattatactctaaattttttgttcaatatcactaattttcacaactaaaacagctctaatccactcgaattgcgccttcatttgatcaaaataagttccttcagtgatgaacttgccactaccgtgaatgtgatagccgcggcccataccagttgtgccaggataattgtaagaaccaaccgcgattgtcaaagcgtgctcaggatctgccttcaaatcattttgaattgagtgcatccccgcagccggaatcaaaatcgtgtcatcagccactacattaatatactgtgaccaagtattcaccacactagccggcttaccgttaatcgaaacgattgtagcgggtcccttatcacgtaaaacatctaagaattcttctgtcataattgccataatttttatctcctctcaaatttgtaaatataatataaaggctaatcccgacaaaccatgacattatttaatattttttcataatctgcttcaacttagtgagataattcttcttcaattcactcggctgcaatacctgcacgtcgctgcctagtgaaatcagataatcaaccaaatagtgtaattcttctctattatactttccttggagataaattttccctgcatcatgcacaatattcataatcgggtaagaattatacttcaccttttgctcgccattttcagttaataagcaagaatacggcacttgataataattttcttcatatttttgcaagttggcagttaatggttctttattcattattttagtttcagttggtaaaacacgaactgcctcgaatttatctaaacgcaaaacgtaccattttttcaggtctaaattataggcatgacagaaccaattgcccgcctgaaagaaaatatcgagcagctgcagtttttgttttccctgcacaaactgaaaattttccacttcaattaagctgttatcaatgcatgccttaagcaaagtcgcgaaaaactttacctcatttaaacttggctggctatagaaatgcactaattgtttctgcaacttaacctgctcttgtaaattctgcggtaggcttttaaccagtttcaattcaatttcatcatacgcattgctgtacggcgtctcactgatcccgcgaattgcttgcaatgcaaaaaagatggcgttaatttcttgcgtgttaaaccgaattggcagcagcaatttactattagtcaaatggtagccgccattgcgcccactttcagtataaaaagctagacctaattgctccaaatccgcaatatcgcgcaaggctgtccgctccgaaatagcaaaatgttcttctaattcttttagatgaaaaacttttttgtcactcaaataaattaattcttgattcaatcgttctgattttttcatggatttctgccatcctaaattagatcaatctgacgcaatttccttctcaatctgccttgttcttcgagtaaagcaaacttacgcgacaaagtttctggggtcgtaccaagatacaaagctagatctttcagttttaacggtaaaacaaaactattttgaccaatttcatttgcatacatttgcaaatatttgaataagcgctcttcaactttaggtaaagttaacaattgaatttgcttttgcatagcagaaatttttgtcatacttaactctaataatctaatgctcaattctggctgctgatggatcaacttcaaaaaatcttgtcgccttaataaacatatttcactattatcagttgcttcaacataactatgcgtattaacttgaccaaaaagccagtcttcaccaacataatcccctgtatgtaagacctgtaagacatcctcatgtccagtttcatctaatgtatatagcttggtactgccatgggccacaattactaaattagcacttacagttggatcaataactatctcacccttttgataattttgatgttgcaccaatctttctagttttattttttcatcttgtggcaaagccgtaaataatggtaccagatcaacgcataaatcagccattaaactcattcctttaactaaaagtcatcatcgtcttcttcagtatacaatccttctttgagatcatggcctaaaaaactttgacttactctaatctgttccttaatccaagcaagcaaatcaatcaaattagcagctaactctggccaattttcatcattagctaaggtaatagccttagtaataaacaaaatctgcgtatcaaaatccttcaccaagttgaataattgttgttcacctgcaagatatttgctactgccatcttcttccaacatggtatattcctgaaattgcttgctagtagtcggaatactttccccgttattaactaataaatggtttaaacgcttgaattcttcatgctcatagttcagccactctgttgccttatctgctaagaataggcttgcactgccttgagcaaacaagcttgcttgactgattttcaaagaatgaactaacaaattagaaataatatgaccagtcattgccgctgcagttggctgatgatgatcaagatcactttgttttaattctgcttgatacttttcttgtgcattcatcaattaagctccttttccttgattccttgtacttcataacccatcttttcaattgcagctttaacatctactgctttaactttgtctggatccatcgtaaacttgagcttccccgcattgaacattaccttaatttgatcagttccatccaaattatcaactgctttttcaatcttagtcaaacatgaaggacaagtcatacctgccaatttcatcattactttttccatttatctaaatttccttcccattagtttacatgtttaatgctacatcgatttgttttttagaaacttgatgatgatcaagtttttgcttaaacctaattaatcgcatcccatttaagataacaactaaaatactaaattcatgaataaacatcccactagccatttctacataaccagcaaatagaccaataaatagcagtaatactgttaataaagcaatagcaatattttcgttcatattaagaactgtcttttttgctaaatctattgcataactaactttacgtaaatcatttttgactaaaacaatatctgaaacatcaattgcgacgtctgtcccacttccaatcgcaatagcaacatctgcgttagccaaggcaggactatcattaatcccatcaccaatgaaagcaacgtgataacccttttcctgctcctttttaacaaaagcagccttatctgctggcaacatttcgccataaacttcatcaattggtaattctgcagcaacttgcttagctgttttaaaattatcacctgaaagcataactaattttttaacgcctaatttcttcaagcgagttaaagctattttagcctccgggcgcaactggtctttaataccgaataccgctaattgactttggtctgcattagcaaaaacaacaattgaatttcctaaattgcttaaatgatttatggtatgtaataattcctgattaagatgagtattttcagtaattaaattttgattaccgagataatatttttcaccagaaatagtagcaattaggccctttcctttaacggtttctactttaatcacatctgatgcttgattatctaacttggcaatcgcctgagctaaaggatgattactttgttgttcaatttgagcagcaagcctaattatttcattccgttgcccctttagtattttgatcgcactaacttccggatgacctacagttaaagtacctgttttatcaaaagcaatttcgtcaatcttacgagtttgatccattacttgagatcctttaaaaataatgccattctttgctccattaccaatacctgccactgtcgacaccggcacaccaataatcaaagcaccgggacatcctaataccattactgtgattgctagtttaagatctctagtaattaggccaactataattgcgatcaccaaaacggcaggggtgtaatatttagaaaagcggttaatcaatttttctgcatgagatttggtatcttgagcttcttctaccatttcaatgatcttgccaaaagttgtatcctctccagctgcaatagtctcaatcgtcaatgttccatcttcaagaattgtccctgcataaacctgattgccaatttttttattagccaagctagattcaccattgatactagcctcattcagatagccagatcctgaaacaatttttccatcaactggaatttgatcacctgttttaactaaaatccttgtacccggatcaataaaatcgacgtcttcttccttagtggagccatcatcttgcattaccaaggctgttgttggagccattttggttaaatctgagatagctgagcgtgttttcttcaaggtgacttcctccaaaaaatcgcccagcataaacaaccaagttacaatagctgcctcattaaattcaccaataataaacgcaccaagtactgctaatgaaactaaaacatcaattgagattaatttaaccttgatagatgaaattgccgttaaaacaatcggaattactccaataatccccacaaccagcattaacaactggtatggcagatttaaatgtaacaaccattttgatccctctgccaacaataacaaaattgtatttaaaagcaggatttgctttttatactttatgaaaaagcgttgtactttaatcattttttcccctttcctttacctgacgattattatcataaaagcaaaagaactctaaaaacttgatgatgatcaagaaaatcaaagatttataatttaatttctgtcaatatttgtcagtatttgcgactataataatcttcagagaaataatgagcaagaaaggtgacaatcatggttgatattttaactaagcaaactactaatcaagaattcttagactttgcggtcgagcaagttcacaacgccgatatcgttactactcacgcaggcgagcctagcgcccaagtttgcgacttattattgaacaaaaacggtaaattatatatcgcaacttcaagtcaaaatccattttttaaggatttgattgctcagccaaaagttatcgtggacggttacaaggggggacggaacgatggactattgcggtttttcaattcgtggtacaatcaaaaatgttgatcacttatatcttgatgaaattttcgccaagaatccttatctcaatgaaatttatgccgatgacctagaaggtgctaaaaaagatttacgtgtccttgaaatcacgccaattaccgcgggctacttggattaccgtactaagccagtcttcatgcgcaacttcaaattctaaacaaaaaaatcagagctatcatttcgacggctctgattttttgttttttcaattaaaagaagattttactcatgatgatcataaagaccaacaaacaagttgagctgattgcggcagcaccgaacacggcaccaccgcgcttgaagatcaccttgaagttaactgagattcccaaggcagccattgccatccctaaaaagacatatgcggcttgcactaagagatccagtgtttgagcagataatggcaaaaatgtcccgataatactcgttaagataaagccacccaagaaccaaggaattggcaatttctttggcgccttggtatgttctgcctcactttcagtcaccaaacgcttttggtaccagtaacccacgattaaagcaaccggtgctaataacaacacacgtgacaacttcataattaaggagctatccaagctgatctcaccaaacgcactaccagcggcaaccgcgtgagcaatttcatgtaaagaaccacctgcgactacaccatattgtgtgtcggttaagccaagcagcggcttaagcatgatctcaagtaatgtgaacatcgtccccatcacacagacaacggccactgccaaaacttcattttctctttttctttcttcatcagtggtctcaatctgtggtgacacacccatgacggcggccgcaccgcagacaccacaaccacatgctgaaagaatagcaagctcatcttcggcgccaaatttgcgactcagccaataagtaagcacgatcgtcccactaactgcaaacgctgcaactaagattgtcttcacaccagcatcagccaacttggtcaaattaagccgaaagcccaacaaaataatccctaatctcaaaaacttgttggagataaaacccataccacttttagcttcagtctgaacgctctgcggcgtcacttgcaatgcaatccctaacagcaatgcaattaccaaagctccaattaagtttacatatggcaacttagccaagaaaattcctgctacagaacaaaataaagtcattcctgcagctaaccaaaatgatttagttttaattatgtttgtcaacaaaaatccctccgtatgtgatcaatttaatttgacaaacacaactcccttaatgatgatgtctataagtttactcttgttttctatctttgacaaggtatattgttaattatttcacatttattcaaaaataaaaaaagaccaagtatctgcttgatcttccacatattgacaaaaaggagtgtacaggatttgaacctgcgcgccaaggaaaacttggttcgccggatttcgagtccggtgcattaccactctgccaacactccgtaacaaaaatattataacctattatttgaataatgccaaaatatctttattattttgactgtctttttgtctccgtaactgctacactttgcagtagtacatcgtactagtaaaagatatagaaaagagaataaattatgtgtacttctattatttttagtccacaagatcactatttcggccgtaacctcgaccttgaagttacctttggccaacaagtagttgttactccacgcaattacgtcttcaacttccgcaagatgccagagatgaagcaacactacgctatggtcggaattgcgcttgacgctggcgattacccactttactttgacgcagctaatgaaaaaggtttaggcatggccgggcttaactaccctgacaatgctacttactacgatgtagttgacggtaaggacaacattgcttcatttgaattcatcccttggattttggggcaatgtgaaactgttgctgatgctaaaaagttgcttgaaaagatcaacatcgttgacatcaacttctccgacaagatgcaagcatccccacttcactggttaatcgctgataagaccggtgtttcaatcgtggttgaaactgacaaagacgggatgcatgtttacgacaacccagtcggctgtttgactaacaacccacaattctcaagtcaattattcaacttaaacaactacgccgacgtttcaccagcaatgcctaagaacaacttctcttctaaggtagcaatgaacggctacagccgcggccttggttcacgcaacttgccagggggtatggactcagaatcacgctttgttcgtgtagccttcaacaagttcaacgctcctgttggcaagactgaagaagaaaacgttgataattacttccacattttgcattcagttgaacaacaaaaaggccttgaccaagttggtcctgacgcattcgaatacaccatctattctgatggtaccaacctcgacaagggtatcttctactacaccacttacaccaacaagcaaattaacgttgtcgacatgaacaaggaagacttagattctgctaagttaatcacctacgacatgttgactaagccaacttttaaccaccaaaactaaataattaagaaataatgttaattttgtctaaagattagcattatttttatttttacggttaaaatagatgtacttattaaagtaattggggatttttttattaatgaataattattttgtgttgctgctttcggcggtaattttactctggcttatttttaacatcaaaaattcacgtcgttttaacctttttgaccattggttacaccaccagttggtgaaacgtcacgacggttatagttggcaagtcatcgccttcatcaatgatcctaagttaatggtagtttgggatgtgctattagcaggattattactaaatgaagagcgtaatttgactgccctttgggtgttagggaccttgggctttgcggatatttctggtattattttgaagaaattaatccgtcgccagcggccactaatgcattccgacaaggaagatggctacagctttcctagcggccacgtacttggggcgacaaccatggggttaattgttttgcaactatttgccaaggatttaggtaccggcttcgtcattgtggtcgttgcactatgggccatggtgatcttctctcgtttgagtttgaaggcacactacccctctgatgtattaggagcaaccagtttagccatcgtttgcttcagcatttcacaacagctatttttagccatttaaaaagatcacgtttatcgcgtgatctttatttttttattcgtgaaaaccaaccataatgccgccttcttcggcgtagaaactacacaggccatgcatcggtcgaatcgttatttgcgcatcaggatattcggctaaaatcttttccttaattgtggcagcgtctttttcattttcgcagtgatcaataattacttcgccgccgtgataattatcttccttcatgtacttgataatttcacggattgcctttttcattccgcgcgccttagtcagcggttcaagtttaccttctttgctagctgtcccaatcaaattgatcttgagcaaacctgcgattttggctacagctggtgaaacacgaccgtttaaagataaattatgtagtgattgcaaaacaaaaagcaaatgagtctgcattctaaacttagcaattgcttcttctagatctacaaagcgcatttcaccttgcagcattttctcaataccatggactatgattgctagctcaggtcccgcacttcttgaatcaactactataattttactcaagggatgtttttcctcatacattgcttttgcctgaagggctgaagaaaaagtgccactcatcccgctggtcattgtgacgataatcgctttttctgttccttcaagtgcgtcaagccatgcttgaatacttggacaagttgttttgcctgccacattattttggttcatattggacaaaaattccttcatattcaaatcttgattatcaaggtaatccttaccaccaaaagaaattgtcagaggcactacttccaaattacgcgccggatcattattcatattggcacttgagtcaacaattaatttaatattttccattttagattccttattttttgtatttattttaatacatatattatagtcctttgatatagagttttttaggctgctttactaatttttaaaatgtaaaccgctttcatatgtttacaccgtcacaaagttaggctaaaatttgagatgtaaagcggagcaaaaattgttccgtatggtatgaaaaacataccataatttttgaggaggtttattaatgctcaaatcagttattgaaaatgtacacgcacttgaaattttcgactcacgtggtaacccaactgttgaagttcacgttactctttcaaacggtgtcgtaggtaaggctgaagttccatcaggtgcttcaactggtgaaaacgaagctgttgaattacgtgacggtggttcacgtcttggtggtaagggtgtttcaaaggctgttaacaacgttaacactgaaattaacgatgctcttaagggtatggacccatacaaccaaccaaagattgacaagaccatgattgacttagacggtactccaaacaagggtcgtcttggtgccaacgctatcttaggtgtatctatggctgttgcagttgcagctgctaacgatgctcaccttccattgtacagataccttggcggtactgatcttgaaatgccacaaactttccacaacgttatcaacggtggtgaacacgctgacaacggtatcgacattcaagaattcatgatcactccagttgctaagacttcattccgtgacggtttcgaaaagatcgttaacgtataccacaccttgaagaaggttcttgaagacatgggttacgaaactggtttaggtgacgaaggtggtttcgctcctaacatgaagaactcagaagaagctttgaaggctcttcacgaatcaatcatcaaggctggttacaagccaggtgaagatatcgctattgcatgtgactgtgctgcttcatacttctacaacaaggatgatcacaagtaccaccttgaaggtaaggttcttactgatgaagaattagcagattactacgacaagcttttggacgaattcccagaattaatttctatggaagacccatacgacgaaaacgatgttgaaggtatggttaagttcactaagagccacaaggaccgtatccaaatcgttcttgacgacttcatttgtactaaccctgcacttttgactaaggctatcaaggaaggtgctggtaacgcttcacttatcaagttgaaccaaatcggtactgttactgaaacccttgaaactatccgtctttcacgtaagaacggctacaacactatgatttctcaccgttcaggtgaaactggtgataccttcatcgctgacttagctgttgctgttaacggtggtcaacttaagaccggtgctccagctcgttcagaacgtgttgaaaagtacaaccgcttacttgaaatcgaagaagaacttggcgatggtgaacgtcttgccttcttcccagacgatgttgatcacgattaatttcgagttaaccgagtacaatttcaaaaaaagcatgagaattaattttctcatgcttttttgcttactcatttaatctttattttactaattgactaaagattttattcagagatgtatctttaactactttaactacaattgggttgccattcctagactgatcaagcaagataaccggcttatcagatttaaggcagaataagtaagtattgtgccaagatttaaagtcatcattagcaattgccagcacattataatcatattttgccttgcccgttggactgtagcctatcttaattgactttttattcaaaacaaaccgattagttgctagcactccaggataagttgcaccctttttggtctttaaattctttttcccatcataaaactgataggtctgaccggactttttaccccagttattgactgcagtctttaacttggctgtcttagctgtattccaaattacaacagccgactttttagtcctatttttcttattctctttgattttctttttcgagtcttttttaggcttaatcttcttggaacttgaagattgtaccttggcagatttagccttttttacgtttactgttttcttattttgttttacttcaccaatcgtcactgcatctttaccaaaatgtacttgactacaacccgtcaaagtcacagctaaagtgactgcagcaatacctacaaaaatttttctattcataaatagctccatttgttatttcttatgtctattatcacacaaaacctccctctttaaccgctgtttaaataaaaaaagagctaattttcatatcaatgtcattaagttaagacattgacaaattatcgacttggacttttaagatcattcatttgtgatttatcgcatttgaatgatcttttttcatgccaaataaacccaaattttgtttagaaattaggctacacgatataaataatatacagctgatttgggtttgagatttcttttgtcttttcgtcctggtctgatcggaattgtgtaatgactaatttgaataagaatctttttaaagatttcagttgaagaagaaattatatacatagcctggatgacaaaacatgactgtttgaaattgatcgcatattgatacttgcagtttttttgtggtacatatgcttgagcatcaatttgactgactgcgttaaacataatcatgtgggcatagatctccatttcaataaatctatcctgcttggaatgaaactgtacgctacctaaagcatatttcaactttttgaatgaagtttcaatgccccagcgcaaatggtagatctctttgatcctttttaagggataatcggctctatttagattagttagaacaacttcccattcttctttgcctgatttaggatcattaattctaaatttacaggcacgaaattttattgtacataactctccaaagtcccagctgccatctttggtatttttagaccgatattttatatattgacggtaatgatggttaaccaaatgaacgttttctgtagccttatgggtttcataataataattagaggtagtcacccagcaagctatatccttatcacactcttgattaggcaactcagctacttccttaaatgcgccatatcccgttttagtacgtatgacataataacagttaggcaggcgattacaattttcaatcatgttaaagccggtataacctcgatccatagtaactatatatggtccgcaatttagctttttaagcatttgaatggcggctttacgttcatccatctttgacttaggctgaaagatgcagtcttgataagtattatttaacaggtcatagagtgcattaacatgaatttggcaatatggctttcctttatgattgagatttccaacgatattctctgatttaggattccagatttgattaaaatcagacccatcaatggcaaatatacgatatttatgatcaaataactggatattaaataaattctgattaaatacagttagaatatgcttaaaacatgcgggtgaaagctgacctttgcgttggacataagcggaagtactgactactttatcgttatttttaatagctttttggccaaaagctctaaacaactcactggtcaaatcttttccttgcatattaatagtagttttaatgactgtagctgcatctaaaaaccgcttcctagtgaaggcatgaggatcatcgataaaatcatgaatatgctttccagtatcattgataatttgatcaagacgatctaaaatatttctgtgaagggctttcataattaacaccagctttctggcaataattttgaaggtttaataatttaatcagagggcgaaaaggtaggttcttttcgcctttattttatgcaaaaaaagaaccaaatcataatgattcggttctacagagattagattcaatttgtcaatgtcttaacttaatgacattgattttcatattagctctttttaattaataaattgtaacttgataacgatttgaacgatccgttgcttccggtttttctccaatcttgccaaccggcacgatgacactcgtctgaaaggcaggatcaatccccagctccttctgcaattcgctgtcatcatttaatctagctgcaccgcccattacataaactgagccaagacctaagtctgtcgcctcaagcataatgttctctgcaccacaggatgcatcgcgctcgccaaacatgctgtcttttttagtattaattataaataatactggggcatgataacacgcattatcggtcttcgtctcaatcttgtcgcgcaatgcttcatctttaacaaccaccaagctcattacatctgtctgatgcattccacaaggagtcgtttgaaaagcagcaattagactcttaatctcatcgtctgaaatagattcactgctaaagtttctaacagctctccgatttgtaaaaattgaattaaccatatatgcctccgtttttactttacatgcctattttagcattcaagattttattgacaacgttttcatgaataattatgatggtggtaaaaagtatagatttttatgaggtgaatacataatgaatttagcagcaattgatattggtggtacaacgattaaactcgcaacttggaaagatggcaaattacaaaataaccatgcagttgatactcctaaggatttaaatggcttttatgatgttttaacagcagaaattaataaaatcaaacaagatactaaaatcgaaggagtagccatctcctcacccggtgccgttgatcaaaagactggaatcattggtggctcatctgccttgccttacatccataattttaagattgttgacgaattagaaaaaagatttgaattacctgtatctatcgaaaatgatgctaactctgctgccttaggtgaattagctgctggtgctggaaaaggttgcaattcaatggtcttttttgttatcggtaccggaattggtggagccttaattattaatcaaaaagtttggcatggggctcatctttttggcggtgaatttggctacatgctaatgggaacacatactttaagcgaacttgcttctccggttacaatggctaaccattataatgaaagaaccggtaaaaatcttgatggtaaaaccgtttttgccttagctgatcaagatgatcccgttgcaagcgatgtccgctctactctaattcattccctggcagttgccatctacaatattcaacacagctttgatcctgaaaaaatagttctaggtggtggcatttctaacaaccctgagttaattcctctcctaaacaaagaaattgatcaaattgaagcaaattcagacttacataccttaaagcctgtcattgccctctgttcactaaaaagcgatgccaacttgcgtggagcagttgctaatttcgagcaaaagcatcaaaattaatcaaactataattgttattttatctaaaataatctttctacaagcctatataaatgggcttttttctttatgtaaattaaaagtatagatttttaactaattagatctttattttcattattaatctgatatacttatttatgtagataaataaaagtgcttacagagggagaggagaaatagatgtctgaaaagcgcaaattgccatccacctttttctggggcaactcagtttcaagtatgcaaactgaaggtgcttggaatgaagatggcaaaggtctctccgtttatgatgttcgccctgctactgacaaaacaactgattggcatgtagcaattgatgaatatcatagatacgatgaagacctcgacttaatgaaagatatgcacctgaacatgtatcgaattcaaatttcatggtcacgtgtatgtcctgatggcgacggcgacttcaacgaaaaaggtatcgacttttatgatcgtttaatcaatgcgatgcttaaacgtggcattgaaccaatgatttgtctttaccatttcgacatgccactgaatttagctaagaaatacaatggctttatgtcacggcatgtagttgacgcgttcgttcgctttggtaaaaagatgattgatcacttcggtgaccgggtaaagtattggatcgttttcaatgaacataacctttacttccaagatgaagttttcaatatttcaggttatgaacatggtgaaaagagcttagatgatatgtacaccatcttccaccatacgatgatgtgtcacattcaattagctaattacatccacgaaaattattctgatgtaaaaattggcggtatgcttgcctaccaacaaatttatccagctaccagcaaacctaaagatatttggtctgccaaacaagttcaagaatttttaaacttcaatatttatgatgctgatactggtcgtggttactcaccagaagtaatgcaatatgccaagaaccatcacatcaacatggatatcactgatgaagacaaagaaattatgaaaaaagctaaagctgacttccttgccttttcatattactcatcatgggtattatcaagtgacaaaattcctgccggtgaggctcctaaccgctaccttaaccaaggcggcgtagaagccaaatacgtaaaaactaacgattggggctgggcaatcgatccacttggcttcagaaatgcaatcactaccatgtataactactaccgtattcctattttccctattgaaaatggtattggtcttaaagaaacatgggatggcaagaatatgatcgaagatgatgagagaattgcatatcatcgcgatcacattaaagccatgaaggatgccatttttgatgatggtgctaaggttcttggctatctcggctggggcttaatcgatattccaagttctcatgctgatatggaaaagcgctacggtgctatttacgtcaacagatcaaatcatgacttaaaagacttaaaacgtgtacctaagaaatcattttactggttccaaaaggtacttagtgataatggagatgaattataatggctgatcaaaaacaatctggatttggcttatgggttaaccaacacataatgccaccaatcatgaaattcgttaacactaaagcaattaccgctctgcaaaatggtatggtttactcactgccattcattattatcggttctattttcctgattttaggaaatattcctattaagtccgttgcagatgcaattaatgcttctggttggggtgctatttttgcacaagccaacaacaccactttccaaatgatgggtttgtgggctgctattggtattgcttatgtttatgttaaaaacgaaaattacgaacctttagcaccaggtcttacttcagcagctgctttcttaatgctacaaaacttaagcattgataatccattaaaggctgctttaacttcaggtcttactgatggttcaatgacaggtaaagtagtaacagaaaacattgataaattgcctcatgctttacaatcattcttagaatcacctgttactggtgtaattaacactaagtggcttggtggtgacggtatgatcgctgcaattatcgttggtttacttgttggttggatctacacaatgattatgaaggcaggttggactattaagatgccagctcaagttccacctgcagtatctaaccaatttactgctatgattccttcaggtgttatccttacaggttcaatgttgatttatgctgcatttaatgcatttgcacacactgacttcttaaactggatctacaatactttacaaattcctcttcaaggtatttcagactcattcggtggtgctatcgctattggattccttgtaccattcttctggttcttcggtgtccacggtggtttgatcatgggatcacttgttgctccaatgcttcaagccaacactgctgacaacgctagattattcgctgaaggcaaacttactattgctcaaggtgctcacgttgttactaatgaattctacaacaacttcattaacttaactggttctggtattactattggtttaattatcttcactttagttgctgctaaatcagttcaattgaagtcaattggtaagttagaattagtacctggtatcttcaacattaacgaaccattcctcttcggtttgccaatcgttatgaacccaatgcttgctgtacctttcttcttaactccattagtagttgctgcttcaacttacttggttatcaaaactggtattgttccaccacttaatggtgttgccgctccatggactacaccagctgttatctctggtttcttaattggtggctggaagatggccatctggcaggcatgtacgttacttatttcaacagctatttactggccatttgctagaaaatacgataaggtattgctcgctaaagaaatgaaagaagctaaacaagaagcaaataagtaaaaatatgctaatcatatgaaattaaatatagttttagaaagagagatgccattaatgcttgtaaaatagtaaaaatgacgtctcttttttgataaagtatagacttttgttttaaaatagaagtataaaagtaaagaagatgaaaaaacatggcaaaggcaaaatatttagaggtcgcaagtgaattaaaaaaacgtattgaaaatggtgtttacagtaagcaagagcccttacctgatcaagaggcattcgctaaagaatttgacgttagtcgtctgactgtaaaaaaggctttcgatggtttggagcgacaaggactagtttataaacaatctggcttaggaacatttgtcgcaggcgaagttccaattaaatctgatattgattctcccgtcaatgcttttactggtttaagaaacttactaggaaaaaacgaagttacaagtaaggtgctacacttctctgttgagtttcccgatgagcaaatacaaaagaacctcgatctaaagcgaaatgaaccagtctataacattgttcgacttagaatctatgatgatcaaccctacattattgagcatacttatatgccaattaagctggttcccgaattagatgagaagattctacatgcatcaatctataattacatccatcaaaaattgcatttaaagtttggtcatgcttatcgaaaaattcgtgctgctaaacccaacgaatacgataaaaaattcttagatgctaaagatgatgacccaatgcttgagctagaacagatcatttggcttacaaatgggcaaccaatcgaatattcaaccagtagaaatcgatacgatactcgcgattacgttttattagataataaccgattttaggaggtattttatggcattctcaaaaaatttcacttggggtggcgctactgctgctaaccaatatgaaggtggctatgatgaaggtggcaaaggtttaaatgctgttgacgttttaactaatggctcagcaactgaaccgcgtaaggtaacttggaaaaagcctaatggtgaaactggagctacgcctctagtttgggggcaagaatttagtctacctgaaggtgctgttccaactattttagacggttactactaccccagccaccaaggaacggacttttatcaccactatcaagaagatattaaattaatggccgacatgggctttgatgttttcaggctatcaatgaactggtccagaattttgccaaatggtgatgacgaacaacctaatgaagacggattagccttttacgataaagtatttgatgaatgtgctaagtatggcattgaaccactggtaactttatcccactatgagacacctctttctttaattacccactacggtggctggaaagatcgccatttaatcgatgctttcgttcactactctgatatcgtgatgaagcactacaaaggcaaagttagatattggcttacttttaacgaaatcaacgccatggacatggctccttatatgggtggcggtttaatcgatggtagcgaacaaaatcgtgctcaaggtgctcacaatcaattcgtagctagcgctaaggtagttaaattagcccatgaaattgaccccaacaaccgtgttggccaaatgctagcttattctgcctactacccttacacttgtgatcctgctgatcaacttaaagtgatggaagccaagcaagagatgctcttctacagtgatgttcaaactggcggccgctaccctaactatcgtcttaagaaatatgaacgtgatgggattaagcttaatgatacaccagaagattatgaattaatcgctaaatatccagcagatttcttaagtttttcttgctatacttcaaacgttttaaccactcatgaagctgatgctaaagctaacggtaatgtttctgctggtggtgtagttaacccatatcttgagagtaatgcttggggctgggcaactgatccagatgttttacgaatcggcctaaatgagctctgggatcgttaccacaagcctctatgggtagtagaaaatggtttaggttctgctgacacccttgaaaaagatggatcaattcatgataactatcgtattgattacttacgagaccagatcaaatcaatgcgggatgctgtcacaattgatggtgtcgatttgatgggatacactacctggtcagcaatcgatcttgtctcaaatgggactggtgagatgaagaaacgctatggttttgtctatattgatcgtgatgaccgtggcaatggctcactcaagcgttatcctaaagattcattctactggtataaaaaagttatcacctcaaatggtgaggatttagactaaaacttttatttataaatagagcctagctaaaaagtgctagactctatttttctaaaaagatatgatgaaagcataagtaatatagatgagagaaggaaaagtatgattacaattactaaacaattcaacttcaaggctaaggacttctttgattaccttgaagaacaattaattcctgctattaaaaaagctcgtggtaatgacatgccggtaacgcttgctaaaggtactaaatacgaggtggatggtgcccaagtagaattaaccgattacgaaagaaacaaggtctatggggctcattttaagacagatcgaatggaattagtgattaaatatgtcactgaggataacgatcaaggcgtaaaaatcaccttttctgaagacatgcttagctttgaccgcgagaaacacggcaaactccaaactatgttttacaatttccaattaaagatgggcgcaaagaaagaattaagacgaatgggtgacaatgttttagctaatattgcagcttaaaatcgccatctcagcagcaaaaagaccataactacttctaattgtgttgtagttatggtcttttttttgttcaaattaacaatcttatctatacctgaattgtcaaattaagtgcaacagttaggttatgaagagatatattgcttgaagagttcctctgctgtgtgatattggaggattcggcgatatttgtggttaatggcattggttgcctgttgaacataagcttttgacttgtctttcatgctcttgcccttagagaagaattgacgcaaaagaccattgcagttctcattggtgcccctttcccatggagaatatgggtgagcaaagtaaatctggcagcccttgatcttggtcatatccgcaaactcagagccattgtcaaacgtgattgatttaaaccagtcaggatgtctgtcaatctccttttgaagcagcctttggcatgtacttgcccgatagtcaggaatcttgataactacttcaaagcgtgtggttctttcagtcaaagtcattaaagcaggctgattcttgcgtctgatgcctttaaccagatctccttcccagtgcagcggagcttttctgtcttcaacctccttaggacgctgttcaatggaattgccaagatgcttcttgtgcaaagcgtgaccgccatggctgtgatgacgcttgttcctgcgtcttttgagcttcataggcagatcaatattgcttatgtccaccaagccctgatcaatatacgatagacagtaggcgtgctgggacaagggtagcctggcatagtccttttgaattcaccaacgaattcatcaatgctggtggcatcaaatttagctttaaagcgtctggagagcattctcaaaaaaacagcataatgctttaatggattgcgctgatagcagtttttgcgacgcttctcataataaatctgtgcagtatcagcgtaatagtgctcatacaataaatagctgctgtctctttgcaggacacttccgcgtttgatttcgcgactgattgtcgacttatggcagccgacttcttgagcgataacagtacgggaagttatgccggaatccagcattgcttgaatttgtccacgttgtacgctggttaattgatgatagtgcttagaaatgctagaatttgaattggtcataaagatcttcctttcttgatttttcgtcacttcaagtttaggtcttcatggcctttttgtttaacacttagtgttgcacttcaattttaaatccgggaatcttatctatatcaaaattaatctattagttcttagtagcgtcagcctgttccttcttcaataagacattgtcatagtgcttgatgaatgggaaccaaactaagaaagcaacaagtgcacaaacaattgaaagcacggcaccttgccagctagtagttgcaagataaccactcaaacccactggagttggccatggttgttgcacaataatcttaggtactaaatgtgaagttactgcgatgtaacccaccaagccagaagcaagtggagcacaaatgaatggcacaagcaagttaatgttataaacgattggcaaaccgaataacaatggttcattaatattaaaaatggcaggaaccaattcaaccttaccaatttctttcaattgagctgaacgagaaccaaaggctaaccagattgccatccctaaagtagcacctgaaccaccaataattacaaaggagttcatcggatcacctgcaaagaagtgattagcaccatttacattagcagccatattagctaaaacaattggagtatagaatgagctcatgatagtagcaccatgaattccgaaccaccataagaagtgaatcaagaaaatgataatcaaaaagccccaccaagtatcagcaattgcactgatgaatgagaatggaatgtaaagaacttggaaaatatcagttcctaaagttaccaaaattagttcaatcaatgcaactacaacagcaatacaaaagcctgggatcaaagcgctaaatgagttagaaacaccagatggaactgatgcaggcatttttattctccagttgtgcttaacagtgtaacggtagatctgaactgtaagccatgcaattactaatccagtgaagataccaacggcagcaattctggtaataccatttgttgaggcttcataaccgcctgccaccattttagtcttagtaaatgtagtaataaattgaacagcaccatttttccaaataagttccagaacagtaatgaagaatgccattaagaacatcatcaaaccgttcatcggtaccaaatcaattttctcttctcttcgataaatatccgtgtatgaataagcaaaagtacctgcaaatactaatgccaagatacccatagtcgagttgtaaactacttggaataagccactaaagcggcctaaagtattcgcataaaatgcggcaaatcctggaattggaaatgcttgaggcagcacattcaaaattaagaaaactgccccgataattgaaaatgaaataacgctataaccagcgtccataatagctctaacaaaacgtgaacctgcaaatttacctgcttttgcagctagcgcatctttaaaagagccagattttgaatcagccatatttctttcccccaatattctgaaacatcattaaatctgaacagccttattatagcgaaagcgttttctaatgtaaacgtttttattgatatacgatatattttggttttttaaaatgtatatttttgaaattacttctaataaaaaaagttcatgtaactttacatgaactattgttggtgcttcttaaaagtctctatcaccttgtgataacgatcttgatcattcataatttgatgaattcggtattcgctccaaacacacaataaaatgccagctaaaaacaaagttgtcataaagaacataatactttgattttcgatgaatgggaataaatacttacccaatggcaaaaacgtcaatattataaaaagcaaatttaaagctgcttgtacttcaagataaactctgctaattgggacctctcgttttcgattatgcattttagttaactgctcaatcgaagcaatcccactataaattgtcataattgccgaaacaataatgccaagaacactatgataatttacatcaataattagccacatcaagttggtaaaaaagaagatagtaataatatatctaattaacttaaacttcccacactaaataagccagtaatctcttgatcttgcttggctttaggcttctatattatttttgctagttttctttaacaatttttgcatgtatttgggtaaacgattgataaagtcagccgtgaattcagctatttgtgcttcactggcatgaaagacttgctttacgctggccagcattgcatcagtaatcaattgcaaggaatggctaaaagtaatgtccgccagctcatcaatcatgcaatagaacagctcgcctagcgtgcgttcatcttcatcgtcccgcttggcaactgacataagcatgtagcgagtaaaaactatggcaacatgagcggtcaaagcatcgtaagacaggccatgatattccgtacttagttttagataacttttgcaagttttgaaaaaaacctcaatatcccaacgcttgccgtagttgcggataatttcatcttcgctaagcgacatgtcggtacaaatgattgccagccaatccttgcgattggcacggtttctaacgcagacaatccgtgcatctattttagcaccgtctttgtcctggcgtccgactttgactgggattgacagcaggtagcgagaacggccgcatcgctttttacagctgcgataaatctgtttgatgtttttgcgttctccctcaaattcatatttgattttggagctaaccttaaccatggcaatcacatccagcttcctttgcttgagctggacgatttgatgtggatttgagaaccagctgtcaaacagcacgtacttggcttgatgacctgctttcatagcttggtcgattaaattaaccatcacgtctgtgcctttagtccgggcaagcatacgtctttggccagcaatggtgcgctgatcaaaaactttattttcgccaatcatattctgtagcttctgagaagacagcagcactgaattgattggcatgaaagaagctccatcagtccagcccagggtcatcatgcgaaaacctttcttgtaagtcattgatacatggtcaaaaactttggcgactaattctgttttcttgaagccggtcctagagaagtaggaatcatcgacaacaaagcaatcagcccgtttttctgaagtcaaagatcgcaagtggttattaatgatttgcgcagacagaagtgtggtgaagtggagccaattgacgtgaacgttgcgcataaaacggtaatatgagttcttggaaaaattttcttgaaaatgatccattttcagctgcatatataagctgcggtcacgaaagacattgcttaaaacgtaaagaaacaagctgaacaggctaatgcctttttccttgcggaagccacattttctcaacagcttgatcacctgaaacttcttgatgaagctgatgattgagtttgaaaatagttgttcattttgttggtcaggagatggtaaaatagacattggcacaagcctttcatgcaaataaattatgttttggtcaatataattatagcaatgaaaaggacttgtgccttttatatttgtcaaaacacgcagaatcacaatgaaacaagcaattttgcgtgtgggaagtttaagtaattaacaaatatcgactaaaatacatatacttaatgctatcttcatgtcttttcttagccgtctctgtctgttcttttttaatgttttgtttattcatttttcttcgtctcatttcttgcctaataattatatttaagcacaaatcaggcaaaaattatcgaaaaaaataactcccgcattcgcaggagttattttcattttcaacgattacttatcttcttttttaagagagccagattcatacagcttttcgtaaagatcaaccatttctccagctaaatctctaaaagtgatagcattcatcaagtgatcttgagagtgaactaccaacaaagttacatgcatgtggtcgccttgagcttctttagttaacatgccggtttgtgaattgtgagcttcaagaagtgatttgtcactttccttcaacttttcacgagcacctgcaatattgccttttttagccaagcgaattgcttcaaaggctaaactctttgcattaccaccattggcaattaaacccatagcagccattaaagtttcttgttctttttgttctggagttttcttttcttctgccataaaatctgtctcactttccttagctattttagctaattaattattcacctttgatcaatttttcagcttgtgccaaaacgttagcaccattcatcatgccgtaatcttgcatattaattacgtctaaaggaatgtccttaccgtctttacccttacctttaaccttgttttcgaagtcacccttcatgtaacttacttgaggcccaagaagtacacaatcgatttcttgttgtgccatcttgtcatcagcttctgatgctgggcaagcaaagatttctgcatcaataccttgttccttagcagcagcttgcatcttagttactaagagtgaagtactcataccagcactacaatttaacatgatagtttgttcagccataataaatttcctcctgaaatttttattttatagtttaattagcttttattgatctacaccaattattataaaacgctttcattgatttgtaaacaaaaaattatacatgcacggcttagtcttaccatgcttatataatcatctcaagcaaaagatatatacttttatctcctgacagccaatattatataccctttgtaagcatttttaaatacatatcctcagcatgttaagcaaagtcctttgcatacgtatgctttaacataaaaaataaattatttttagcaaacgctttcaattaataaatgaatactgttagaatgtatatgtaatttattcctttacaatagaaaggaggcagaatcttgagtcgctatcaagacattgccaatgatatagaaaaagatattattgagaaaaaatatacaagaaaactacctgaacaatttgaactggcccaaaaatatcaaactagtcgggtcacaatcgttcacgccttaaagattttacaaaataaaaaattaatacggactgtcaagggacatgggacctttattacaagcaagtctattcccgacatttttcttaattctgatgtcaatgagcataccggctttactcgtcatgtcaataatgctctcgcaataaccagtaatgtgattgcctttaacattcgcaaacctagtattagtgaacgaaaagctctttgtttagaaaaagatgacgaagtttacgatattattagacaacgaattttaaataaaaagccagctaaattagaatataccgtgatgccagttagccgcatccccggtatcaccctagatattttgcacaagtcaatctactcttatattcaaaatgatcttgggcttaagatcggccgagcagatcgcattattacagctgaaaaatctgatgcatatgatatgaagtatcttgaatgtaaaaatgatgatcctgttttatgtattcagcaaaaggcattccttaaagacggacgaccttttgaaatttctgagtcacgtaatcgctatgaccgtggtgatttaacagttaatggcaaataagtgttacttgattaaaaaaatcaattatggcaaaatggctctcgtaagcgtttccaattacatacaagaaagtgaggaaaaatttaatgtattcagcaaaaatgcctaaaaactttttatggggtggtgcagttgctgcccaccaacttgaaggtgcttggaaagaaggaggaaaaggtacttctgttgctgatgtaatgaccgttggttcagctactaaaccacgtgaaattactgacggtgttcttgaaggcaagaattatcctaatcattcagccattgatttttatcatcactacaaagaagacattaaattaatggctgaaatgggcttcaaggcttttagaacttcaattgcctggacaagaatctttcctaatggtgatgaagccgaacctaacgaggaaggtttaaagttctatgacgatttatttgatacttgtcatgaatacggcattgaacccgttattaccctctcccactttgaaatgccttttaatttagctaaaaactatggtggttttaccaaccgaaaagtaatcgatttcttcgttcgttttgcagaagtttgcttcaaacgctacaagaataaagttaagtactggatgacctttaacgaaattgataatcagtctgcattcaataatgatttcttgatggctactaactcaggcattttgttcaaagatggcatgactgacagagataaagaagccgccatgtatcaagcaggtcactatgaattggttgcttcagccttagctgttaagattggtcacaagattaatcctgatttccaaatcggttgtatgattaactactcacctgtacgtccgctcactccatcaagtgatgatgtccttttagctgataaatgggagcaacgccgtgactggttctcagatgtacatgtttttggtgaatatccaaatgcagttgaatcctacattgaacgaaatggctatcgtcctgatataactgatgaagataaaattgtcctaaaggaaggcaccgttgactacgttggcttctcctactatcagactactaccgtttctagcgaaaaagttaaacctgatgaattaactgatttggctaaagctgttgctaagaatccaaccttaaagcgtagcgattggggctgggaaattgacccagaaggcttaagaattgcattaaatcaattgcaagaccgttatcacaaaccattattcatcgttgaaaatggtcttggagcttacgataaagttgaaactgatgggtcaattcacgatgactacagaattgactacttaagaaaccatatttcagaaatggaaaaggcagttgaactcgatggagttaacttaatgggctacttaccatggggctgtattgaccttgtttctgcaggtactggtcaaatggataagcgctacggctttatctacgttgataaaaacgatgctggtgaaggtacattggctcgttcacgtaaggactcattcttctggtacaagaaagttatcgaatctaacggtcaagacttagattaattaaactattaatagcaaaaaactgatattcagactttaatcattgaatatcagttttttattttataaatatttactgccttctttaatactcaatttagctaaatgctctcgatgcagttcaatgaagttacgcacccaatctggattggtcttagagtaatcacgcaaagcccagccaattgccttattgataaaaaactcctgactatcaagattattttcaataattttttgtaataacgcggtgttcatcttctttttacgcaataattgatgctcaatcgcgacccttcttacccagaaatctggatcttgcgaccacttgagcattagatcgtctactcgattatccgttaagccaacatagccataaattttgattaatgagtcaatcgtatcccaccattgctttgttctaacaaaacgctcaattttagctaaatcatcaaaaacaatatactttttcattgccaataaataatcacaggcaaaatattgcaattcgcgttgttcttcatcccatgcctggtctagcaacttccagtcaacttcttttttcttcttttcatctttcaaaaaattatgataaatcgccctaggttctggtgtttgtaggccatagaatagaaattgatttcgcatgtaaccaacaagatgattggccttttcttcatttgcccgagcgctaaattctttttttaatgtttcaatattcatgttttttattttagcacaaaaagaggtctccaaattctagagacacttatcgtaaaaataatcatctacccgatcatttcaactaaaagcttggtagaataaaagtatctatattaagaaaggcataaacaatgaaacaaatttattttaaccatgatggtaatatcgatgatttagtatcttatctgctcttactacaagcaccagatatcaaacttttaggtgttggtgcaattgatgcagacggctacattgatcctagtgttgaagcatgtcgcaaaatgaccgatctttttaacttacgtggtgatgatttgactattgctcgttccaactcacgtgcagtcaaccaatttcctcacgagtggcggatggcaacttattcatttaattatcttcccatgctcaatgaaagtggcaagattgatacgcagcaggcaaaacttcctgctcatttagacatggtcgaaaaaattaaagaagcagacgagcctatcgctttagttatgacaggtccgttaactgacctggctcgcgctttagatatcgatcccgacattgagaaaaacattgaaaaactttattggatgggtggttctcttgatgggcacggcaacgttgctatggttaacgctgacggtagtcaagaatggaactcgttttgggatccatacgcagttaaacgcgtatttgaatcaaatattccaattcagatggtgggattagaaagtacggaagaattaccacttaacgatgagttgcgtcagcactgggcaagtttacgcaaatatcctgcaatggacttgataggacaaggctatagtctaatcgtatctataccatcagccgaactctacctttgggatgtgctaactacaatcagcgcactatatccagaagttgttgaaaccgaaacggctaaagcaagagtcatcactgatgggttaagtgcaggaagctttgtacgggatcctaaaggaagagaagtaactcttgttactaaagccaataaggatctcttcttccaaaagatggatgaaattttagaaagaaaataacaaaaaagaggccaatgtcattaagttaagacattgacaaattatcgacttggacttttaagatcattcatttgtgatttatcgcatttgaatgatcttttttcatgccaaataaacccaaattttgtttagaaattaggctacacgatataaataatatacagctgatttgggtttgagatttcttttgtcttttcgtcctggtctgatcggaattgtgtaatgactaatttgaataagaatctttttaaagatttcagttgaagaagaaattatatacatagcctggatgacaaaacatgactgtttgaaattgatcgcatattgatacttgcagtttttttgtggtacatatgcttgagcatcaatttgactgactgcgttaaacataatcatgtgggcatagatctccatttcaataaatctatcctgcttggaatgaaactgtacgctacctaaagcatatttcaactttttgaatgaagtttcaatgccccagcgcaaatggtagatctctttgatcctttttaagggataatcggctctatttagattagttagaacaacttcccattcttctttgcctgatttaggatcattaattctaaatttacaggcacgaaattttattgtacataactctccaaagtcccagctgccatctttggtatttttagaccgatattttatatattgacggtaatgatggttaaccaaatgaacgttttctgtagccttatgggtttcataataataattagaggtagtcacccagcaagctatatccttatcacactcttgattaggcaactcagctacttccttaaatgcgccatatcccgttttagtacgtatgacataataacagttaggcaggcgattacaattttcaatcatgttaaagccggtataacctcgatccatagtaactatatatggtccgcaatttagctttttaagcatttgaacggcggctttacgttcatccatctttgacttaggctgaaagatgcagtcttgataagtattatttaacaggtcatagagtgcattaacatgaatttggcaatatggctttcctttatgattgagatttccaacgatattctctgatttaggattccagatttgattaaaatcagacccatcaatggcaaatatacgatatttatgatcaaataactggatattaaataaattctgattaaatacagttagaatatgcttaaaacatgcgggtgaaagctgacctttgcgttggacataagcggaagtactgactactttatcgttatttttaatagctttttggccaaaagctctaaacaactcactggtcaaatcttttccttgcatattaatagtagttttaatgactgtagctgcatctaaaaaccgcttcctagtgaaggcatgaggatcatcgataaaatcatgaatatgctttccagtatcattgataatttgatcaagacgatctaaaatatttctgtgaagggctttcataattaacaccagctttctggcaataattttgaaggtttaataatttaatcagagggcgaaaaggtaggttcttttcgcctttattttatgcaaaaaaagaaccaaatcataatgattcggttctacagagattagattcaatttgtcaatgtcttaacttaatgacattgaaaaagaggctcacgcctcttttttatattgccttaattgactttttgtaaagaattaccgcaatccaaactgaaatgaatgatggcagtatcgcaactacaaacaaatttggatctaaaaaattacctactctgatgaagtttgtaattgaagtaatatgttttatgttactaaatatcgcttgataaactgtaacatatattaacgaccactgaatataatattctaccaaagtgagtgtagttgtcgaaaacttaaaaattttgctagccagtcgcatcccccaataaacaaaaacacctgaaagtacaacaaatgctgctaacagcaaaaacaagtttcccaaattaacatggtcccattgactcatgatcaaatacgcaattaccatgaaaattaagaaattaattgttgaacaacacagctgaatgacaaataaaattgcagcctttaagaattcaaacttgtgctctgatctgaataacaaaaatactactagaataattacagcaatgatgaaatatgtagtaacgtgcacagttatctcctactttgcctgttttaaggcttcgcttgtagcctctttaaccccattggaagtaaatgttgcaccagtaacagcatcgatatgagcagattgtttatccaaaatttcctgctttaatgttttttctgctttttgaccatactgcggcgtttccgtagataaatctaaatctacagttgaaattttattatcagctacagttaatgtcacacctacaaagcctgccatgccgcgtgcacgggcactatatgttccttcttttaacatcctttttcctcttttttataaaacaaaaatactgctatataataaatataacagtattcctaaaaaaagccacaaagatattgtgtttagtatatcatattgatatactatttcttgggtcttgattgtttttataagtccttattatgacccatgtgcaggtagtagaatccccttctacctgttttattataccacaataaataactgatgttatatcaaatcctaagttcttttgaaaattttctcaaaagggcttttcttgcactatcctttataagttacgttaaaattgaaatggaattataaagttatatttaaagaaggtaaagcatgtatccagataataatattcttacatatttaaaatggcgtggtgacgttgacttctcaacatcgccttttaatgatattgatgcacttgttttatctattttttcttatcttgaattaccaggtattgttaaaagtaacggaacgacaattagtttagaaaaggctgccaagctctattttgcagatgatcatcctcgttatgataatttgcaataccaagaactatttaaattaatggctcatgcagaccgctttaaaaatgcaaaactgtcgtattttattagtacgttaactgaacatactcaatttagtgcaatcaaaattgaactaactgatgggaccaactttattgcttttcgtgggactgacgattcactaattggctggaaagaagattttgaaattagttttaaaatcactgtagcccaacaacaagcagtaaaattgctcgaaactattctcaaagctgatgatcaagattattacttaggcggtcactcaaaaggtggcaatttagctgaatatgctgccattaatattgagcccaaattaagaaaaagaatcaaacgtatttatacctttgattcacctggaattgcagaagaaattggtgctcagctccctaataagtatttgcaaaatactctacgccgctttgtgccagactttagcgtcatcggtcgcttatttgagtcgaaaaatattccagccactattgttgatagtactcgcaagggactaagccaacacgatgctttttcctggcaaataatcggttctaacttcgacaccagacgccaccgcaatgctcaatctcaagtatataatcaactaatcaatcaatggattggtaacgccaccctagaagaacgtgagtctttaactaatgacctcttctctgctttaagctctagcggcgcaactaagatcaacgaacttgataaaaatggttttggcggttttggtgcaattttgttttcactggctgattcatctcggcgaacccgtttcgtctttggttcattattttccagcatttggcagacgatcaagagccagcaactgaccaaagcgcttttctcaacagacacaattgttggttgggtgctggtagtattaggaatcattagtctaactctaccccaatatgcagtgcgcgcttttggcgccctagttgccttcacggggattggtttcagtgttcaccaaattttaacaacggcaaaatctagtctaaaagaccgacaaaaaaacttctttattatttcgtatttagtagtttttgctttatcaaccgcgttaatttctaataaccgtctactaattttcttagctcactacttcttaggactattcttaattatctattcctacattcgaattaggcaactagtctttcgtaaattacccggaatttttcagattactattgtagcgatcgaggcattaattgcttttgctttaggaattatcgtagtggttaaccctagtgcctttaatcggagagcaattattattatcggtattttgctaattgcttacggcttcttcaagttagttggcgaattatttggccagcgcagcaaaatgcccaaaaatcatcgttaaaaaaagcttgttaacttcaatatcagttaacaagcttttttcttagcccttaataaaggtattagcctttatatgctttaaaatgttatacccgattgcacgaatatgatttttactaccataagtttgattcaaaaacattacaattccattctgattatcagtagtcagttgcatccagttaacaaagtgggtatcaccaaaattgccataagcgacttttaaagtttgattctttttcagataaaaaccacctgagtaagtattaaccttagaacttaaatgaccaagataatggaactgttttttagtcagaatcttgccattttgcataccagattggattttataataatcattagccgttgaaaatagattcccagcaccaggcaattgagaaacaacattacgattagcataggcactagcactgtaatttttaccaccagaataaagatatgaaatcgcatcagtctttgaccgcggaatttgttgataaatatcggtttgcttcaacttcaatgatcgaataacccgctgtttcacattagcagcataagactttcccgttactttactgataatgcctgccagcaaaacatagttagcattattgtaattaaatttactgcgtcccgtattttctcgtgcattggcttgggcaattgtccaattgatcgcgccattttcagaaaaattaactccatgattagattctgttccaattacgttaattcctgaggtatgtgtcattaactgccccaccgtaatttggtttgcatgcttcaaatttggataccagcgtgaaatcttagtattctgattgaatttcttctggtagattaactgtgtaattattgcagcagtaaccatcttttgcaaagaaccaactggataaagcaattttgtattgccatttttcagtcgtttgctgtaataaccgtagcctaagctaacacgttgagcatgcccattttttacaatttcaatgcttcctcgtaaatgatgctttttcatcatcttaagcgtatattgccgtagttgcttatttgaataactcttcgcctgcacagcatgatttgacattatcaaacacgatgaacaaaataaaatgaaagctatcccgaacttttttagtgtcttcaaaatttcaatctccttttaatcctgaactattctaccacaatcaaaaagcgcaaaatcacttttaatcatggtttgcgctttcatttttattttttaaaatttttatagtaagttcatcttaactaggtattccgcattttcaaccgtattccatgcagcacccttaagcaaattatcggctacaatccacatgttgaaggcacccttattttcataatcagggcgaatgcggccaacaaaagtttctcgcttacctgttgcattaattggttgcggataaatttgatgtttaatatcatcttccaaaacattacctggaaaggcagcaactgcatctttaatatcttgtgccgttgcagtctcatcttcaagagtaaagtagacactttccccatgagaaattggcacaggaaccctaacacaagttgcagttaccttgatatctttggcattcatgtcatttagcatgatcttctttgtttcatgaatcatcttccattcttcatgagaatagccactatcttctaaaacatcaatttgaggtaacaaattaaaggctaatgggtaatgctttttgtctcctttagtaggtaaaatatgagcgtctgcttgcatgtctttaccatcaaggtagtcttgactttccttttttaattcatcaattgctgcttgtcctgctcctgaagcagcttgataagtggaaacgataatttgtttcaaaccaaattttcttcgaactggttccaaagccattaccatttgaattgttgaacaatttggattggcaatgatgccgtgatgctttttcaatgcttctggattaacttcaggtacaaccagtggtacatctggttccattctaaatgctgatgtattatcaacacagacagcaccacgcttaacggcttccggcagaaacttctttgacactgcaccaccagctgaggaaagtactaaatctacaccatcaaatgattctggtgtagtttcttcaactttcaaatcttgatccttaaattttaaaactgtacctgctgaacgtgaggatgcgagtagctttaagcttttaactggaatcgttgattgttccaattgttcgatcattcttcttcccacggcaccagtagcacctagaattgcaacattatattctttcaccattatttttctcctcgcaaaaaattcttcattctttccatcgcttcatgtagattttcatcactggaagcatatgacattctaacgtacccttctccaccaggaccaaaagcactacctggagtaataccgacttttgcttcaaatgctaaatccagtgcaaattgcatatcatttttaccatatttagctggaatcttagcgaaaatataaaatgctccctgtggtctaactgcttgcatccccatcttagctaattcatccaacacaaaatcgcgccttctttgatatattttgcggtatttttctggatcatccaatccatgctccaaagcttcagtcgctgcagcttgagaagagtcagttgtagtcgtaaccattaaaccatggactttaccaatttgttccataatttttgccggaccagctacataacccagtcggtatcctgtcattgcatgtgacttagataatccagaaatataaattgcccgttcaggaatcacacttgcaattgaaaaatgcttaacgccataagttaaagtactgtaaatttcatcagtaattacgtacagattgtgtgcttttatcacttcagctaatgccctaatttcgctttcggtggattcaactcctgtcggattaactgggtagtttaagataaccgccttgatattagattcttccttaagtgtactttctaatctttctggcgttaatttaaagttatcttctgacgtgttcattaatacataatctgcatctgctaaagttgcaactggccaatatagtgaaaataccggtgtaggaatagcaaccttatcaccccgattggtaattgaaaatagtgtcgcattaattgcttcagttgcgccaactgtaaccacaatttcagtttctggatcgtaaactactccacttgcttttttcaaataattgctaattgcttgcctaagttccaattttcccttttgtggcgcatagtgtgaatcattatttcgaatactttcaattgcagctgttttaacatgctcaggtgtattcatatcaggctcacccaaagtcagcttgataattccaggaatggttgaaactttattatcaaaaatcctaatccccgaagccttaacagattgaatcttcttacttaaagctaagtcatttgctaattctggcataatttttcctcttataaaatattctctaagccaataactagttcagttaattgatctactttttctaaagcaactttaaccccactcataaaggaatcacgatcaaatgaatcctgtctaatggttaaagcttcgccaggtccaccaaataaaacttgctcatgtgcaatatagccaggtaagcgtactgaatggattttaattccttgataatctccaccgcgaacattggctaaagtctcagtttcatcaggcgcagtttgatgttcaggacgattttgcgcgatcatttttgcagtagctaaagcagtgcctgaaggtgcatcttttttatctgcatgatgcatttcaataatttcaacatcagggaaatacttagcagcttcttcagcaaacttcattaataaaactgccgacattccaaaattaggtgcgattaagccacctaatttttcctttttggctagttcaatcaaagttgcttcttgatcatcactcaagccagtagttcccacaataggtttaatttgatgcgttaaagcaaaataaacattgtcatagacagctgcgggagtagtaaaatcaatccaaatatctgcagcatggtcaggaatttgacttaattggttaaaaatttgggctgttttaggtaaatgatatctttcaggctcatttactgcctttggagcaaatccagccaccaattcaaaattgggcagctgattaactaaactaacagccttttgccccattgcgccagtaaacccagctattagtacttttttaggcatctcgtcttaccaatcctttcctaaattaagtggcaacttttgcatcaatgcattagcatttaaacctaaatgctgggccaacttttctttttcctcatcacctaaagcgactaatggcaaacgacatccccctactataaatccttgagcattcaaggctgccttaacaggagctggtgaaggatacataaacaaagcctgcattttcggcgttaaccagcgttgaatcgtgcccgcttcaggataatttccttcataaagatcatcaaacattcgccgcatttgtttgcaatataaatggctagctacggaaataacgccattggctcctagtaatcttgcaggtaacgcttgcgtatcttcaccactaaataccaaaaaattaggatctttatgatcaataatgtattccatttcttctaaagatgcacattgtttgattcccttaatatttttaaggcgtgataattggactaccgtttctttttccatttttacgccagttctaccgggaatgttataaatcataattggcattttagtctgagcattaacagcactaaaatgtgcaatcatgctacgctgatcaggcttattgtacggtggcactactactaaggcataatcaattcctttaatctgtgctacctcattggtgaaggcgatagtggttgcagtgtcgttactgcccgttcctgcaataaccggaacacgtccattaacaatttgaccaaaatgctggtacaagtctatcttttcatcatgagtcagagttggcgtttctccggtcgtaccaccaactacaaagccattgcaaccttggtcaattaaataattaaccagcttttctaaactggcaaaatctattttttgattctcatcaaatggcgtaacaatcgccgttaacaaatctgcatcaattaatgttgccattttattgcctcattctattaatcaaaaatcctttgattgcatcaacgccgcgctgaatgcttttctcatcaggattaagtgtagccgtatgcaattgtgaatcaggattaccaacacctagccaaaacattgttccagggaatttagccagcaaaaagccaaaatcttcacccgtcatttttggttcagtagtaataaagttaaccgtcggctggcttttcatatatgaaataaagttcttggttaattgtgggttattttctactggccaatatccaccttgattcaagtctaacttcacttctacaccaaagcttttctcaataccaagacagatttctttgagacgttgatcgattgtcaaaatcatattttgagttaagccacgaatcgtgccctcaattctagcttgaccagcaattacatttctaatcgtaccagcttcgattttgcctagagtaataacaccactttgaattggatctatgcttcgtgaaataatagtttgaacctgcatgatcaaacttgctgctgcaactaccgtatcatttgcatcttgcggaaaagctgcgtgtccacttttacctagaatatcaatattgacttcagttgtaccagcaaaaagtgtacccatccgacacccaatgctaccagcaggcaaagcggggttatcatgcaagccatagaactcgtcaggtttaaattgatcatgaaaaattcttttttcataagcttgcatcccaccactttggctttcctcggctggctgaaagaaaaaaagcaaattatcttgtggctgattttcactaaaatagcttaacaaacctaatgccacggtcatatgaatatcatgtccacatgcatgcattactccctcatgttttgatgaaaatgccagtccagttttttcagtaactggtaaagcatcgatatcagcacgatatcctatcgttctgtgtggttttcttcctttaactaatactagaattgcggtaggcagtgtcgacggtatctcaacttccaaataatcttgcttaaatttttgaattacctcgattaaataatcatgtgtttctttttctgctagtgctaattcaggtatttgatgtaaatgccttctaatttgaattaactcactttcacttaaaactgacattttataactttctcagattatcttctagttccgtcttactactagttttttcatcaacttttttaataattttagcaggaacgcccgctaccatcgtatgtgctggcacatcatgagtaactactgctccggctgcaataacggctccttcacctacatgaacaccctcaatcacaacagcattagccccaatcatgacattatcatcaatttgaaccggtttagctgaagcaggctcaattacaccagccaatacgctaccagctccaatatgacaatgttgtccaacaatggcacggccaccgagaactacgcccatatcaatcatggtattagccccgatttctgctccaatattaataatggcacccatcataattactgcattattaccgattaccacttgatcacgaataatagctcctggttcaattcgagcattaacttttttgaagtccaataaaggaactgctgaatttcgtgcatcattttcaatatggtaggccgtaatttgatgattttcttttaaaaatggttcaatatctttccagtcaccaaagatcgcgccagaatgagcttcagtaaaattctcaatttcctttggaaaatcaatttgtgctaaatctcctttaataaagacttttaccggtgtcttttttggtgcattaccaatgtaatcaataatactttttgcatctaactttgatacattccctgtcaagtagacagtagaattacataaagcttttattcctcagttgattaataatcagctgaggattttttggcttctcttattttcttttcgtgtattttttgccagtatttctcaattcgatgatttggtgcaatagggcaattcttaatattgcctttcatcgcttctttgcgcatttcaccagcagttaaaccgttaaaacgtttctgtggatcttcattaatgtagtaatctattgtcttacaaatagaatcattaagttcatcataactggccacttgaggatgaagaataactcgcatttctttgataatgccttgccagccttccattggaccattatcaatacagcagccaacacgagacattgattgcgtcatgccttggtcttttaattggttttggaaaggtgcgcgagtaaattgaaaaccacgatcactatggaaaagcggatgagcattagggtatgctttaacagcctgcttataggctgcttgaactaaagcagtatcgtttcgtttactaattgcgtagccaacaggatagcgatcatatagatcaaacacagtacatagatatgccttaggcaggttagcagcaacgacttcagtgatatctgtacaccatttttcattaggtctagatgcattaaagtctctttttaacttgttttcggccgttttctcaggcgttgtatgcttgaactttagcttctggtatctaggcttttgtgatctaatgccattgatacacatcaagcggtaaacagttttatgataaaccggcttttcatcagacatctgtcgattaactgccatggtcatcttttccgtcccaaacagactgttgttagacttggttatttcaatgatctttgcttcaatctttttgtctcgttcttcacgcttactcggcttgcgcttaggatcaaagtatttgtaataagctgagcgtgctattttagcccatttgcacattaaatcaatcttccaattgtacttttgatggcagtcatggattaactgatatgtttcttgtttccagcgtctttttattgcggcttgtctgtatcttggttgtccggcaagcacatcctttctaactgatctaatttttttaggaattcgttcttagtttgttcttctttgagctgacgctctaattccttaatttttcgattagccagttctaactcagttagctcttctggcttcttatgtctgcctcgtttatctgttaatcctgtttcaccattagctagatatttgtgtgtccagctgtaaacctgctggtaagaacaatcaaatttgacagctgtttgagtgtaattcttgtcgtgattaagacagtattgaacaatctgaattctttcttgctgggtagtttttcttcttgctttagtcatatagacctccggatggggatcatagtcccgattttctatatgactattatacttggaaacccattctgatactgttccattgcttctaatgccatatttattagctaaagaaggtaacgacattttgccagctaaatattcttgaacaaccttttctttaaatgccttagagtaatgattattgtattgagcattacttagaagggtatcacgattgctttgatattgatgaacccatcttcttacttgcatcgctccacttttacttggcatcttaagccgtttagctatttcaacgctgctcctattaccattcaagtattgttcaactgcccatatcttttgatcgaatgaatatttactttttctggacataaaaaatcccacctccatggataattgaatactttatgtatttcaatcgtccactttagtgggattgtatcactttgccatcttttttctcttttctaatttaaatatgattgatctaaatgaaccaagtcttctaaactttcacgcttaatgactaattttgccttaccattttctgcaaataccactgctggtcgaggattacgattataatttgaagccattgaatacccatatgcacctgtatccaacatcgctaacaagtctccagctttgacttgtggcaaagcttgatcttctgctaatatatcgccactctcgcaatacttaccagcaatacgaacatgttcagtcaaaggcgcttgtggatcggtggctaaaactgtttcatacttagcctgataaagtgcagggcgaatattatctcccatcccgccatcgacagtaatataagaacgataacctggaatatccttacggctacccaccgtataaaggttgtaaccggctggaccaacaattgatcttcccggttcaatatcgatttcaggtaaaggataattcattttttcagcttcagttttgatcaccttaacaatcgtcttaacaaattcttctggtcgtaatggatgatcttcttgggtatatttaatcccaaaaccgccaccaacattaataacttgtgcaagatagccatacttttctcgccaatcttgcgctactaccattaatttttgtgctcccatttcaaagccgtttaaggcaaaaatctgtgagccaatgtgagcatgaatccccaacattttcatcctaggattagctagaacttgttttaatgccttttctgcttgacctgattcaagatcaaagccaaatttactatcaatctgacctgtttgatcatattcatgggtatgtgctgaaatccctggtgcaatacgcaacatgacactaatcgtagcatcgtacttttttaaaacttgcgccaataactgaatctcatgaaaattatcaataataattttgccaacatgattttttacagccatttccaattcagttaatgatttattattaccatgaaagctaactctctccattggaaaattggcttttattgcagtaaataactcacctgctgaaactacgtcagtgtatgctccctcttctgcaataacttgatacattgcgattgctgcgaaagctttacttgcataactaacagcataggccatgttttcttcttcaaaaactttcttaaaagcccgaatttgtcgacgaatttgatcgacatcataaactactaatggcgtaccatacttttgagctaattctactatatcaactccaccaatcgttaaatggccttgctcattaatctgatctactgcaatttgtgaattcattttgttctcctgtctttttcaggcgaaacgctaataaaaaatccattgtctgcgccaaacaaacaatggattaatttctacttaatctatggtcgatagcgctccgcgaattttgttcgcgacagtccgcagtttattcaactacgccccagctcaagcctttagcatgactcagcttcggcaacctccccttttacaattcatcttcgttttgcccaactcagaattgttacttatgtcggctgcgcctcttcgattgactgtagtttacaattttataaaaacatagtcaacaaatttattataaaaatttaattttatttgtaacaatgcggcatttagagtgataaattacagtcatcacttgcaagattaaaaaataatgttagaattcaattaaatttagtctgacttttttatttaaattaatgatttctgaaaacaaaaggagttttgaaatgaaaatcgtaaagtttggtggctcttctttagctaccggtgaaagtgttgcacaagcaattcaaattattctcagcgatcctcaacgacaagtaatggttgtctctgccccaggcaaaaggaatacaacagatatcaaagttactgatctgttaatcaagtacgcagatttagccttaaagcacaagaattgtgttgaaatcgtgaataaaatttttagtcgctatcaagaaattggtcattattttggcttagctgatacggaattaagtattattaaacaaattttattagagttgcccaatcagggttatcctaacgaaaaatatcttttagctgcatttaaggcacatggtgaacggcttaatgctcgtttaattactttaattttacgccatcaaggaattaatagtcgttttcttgatccggctgaagccggtttaatcgtgactggcgagcccaatgatgccattgtcaatccagagagctacttaaatcttgaccaaattaaaattaaggctgatgaacgtatcgtatttcctggcttttttggcatgactccgtctggtaatatcgccactttttcccgtggcgggtcagacattaccggggctattctagctcgcggctttcatgctgatctctatgaaaattttacagatgtcaatgggatttttgccgctaatcctcatattattgagcatccccaatccatcaagaaaatgacttatcgcgaaatgcgagagttgtcatatgctggcttttctgtttttcacgatgaagcattgattcctgctattcaaggacagattcctatcaatgtgaaaaatactcatgatcctagcaatcctggcactatgattgtcccagaaaaggattttgtcccagataatgcaataaccggcgtaaccagccaaaaacatttttccgcattatatttgcataaatatttgctcaataaagaagctggtttcaccttacgtatattacaaattttataccaacataatattccatatgagcatatgccatctgggattgacgatattaccattatttttaacaatgattttctaaacgatcagttaattgatcaaatttgtaatgaaattcaagctacaattaatccagatcaactcgaatggattgaagattatgcaattattatggttgtcggcgaaggaatgcgacaaaaacataccatcagccgtcaaattatcgattctttaggcgatcatgatatttcaccacaaatgatcaatcagggagcttctcaaatttcaatcatgatcggtactaaaaaagaaaaggctgatgaagcagtaaaaattatttatcaaaagttttttaattagggggcattatgattaatttattcaaagttcacggttcgcaaaatcatttctttattcttgatcaaacacaattcgaacacgaattaagtgacgccgagctaaaaaattttacgcaaaagattaccaatccacaaactggactgcttcacggagcagatggcgttttagtagttaatcatcccgtgcattctaactcacttggccagatgcgtgtaatcaatgctgatggaagtgaagcatcaatgtgtggcaacggtctacgcaccgttgctcgttacctaagtgaaaaaacgggaaaagataatttcctagttgacacaatgaatgccagcttacgtgttagaagagaaaaagattttgcttctaacgtgccagcatttgcagttgagatctctcctgtacgctttaataaagaggcactcccttttgataatttaggacaagaacggattattgatgcttggttgccagaaatttatcctggattacgttttacttcaattgccgtacctaacccacatttaatttcttttgttaatcaagcagaaattaccggcccgatcttaggcattgttggtaaaaaattaaatagcaataatccctactttacagatggcgtcaatgttaatttcgcgcaaattttagataaaaataaactttttgtccgcacttacgaacggggcgttggttttaccaatgcctgtggtactggaatgtccgcgacttctcttgctcttactttaacccaccccgaaataggcaacttaaatacaccaatatcagtttataatcctggcggtatggttaaaactatcgtgcattatgaaaaaaatagttattggatcgagcttattggtaacgctacttttactcatcgaattaagctttctgaagctgacttaaggaaaggtgatttttccaatgtccagatccaaaagactgctgaacaaagtgcttatgaaaaatttattgctaatctgccaaagttcaatgacattacaactttagcgtaaaaaaatggcttgcaacacgcaagccatttttactttttaattattaatctaagtctttcaagccatgctttttcttggaaacgcgataagctactaaaccaaagaaaattggaccaaagcttgtccaaaaagcagttgcatatctatgctccaaaactggttgcaaaaccgtaaatataattccggtgcaaacaatcagctcaacaaagactactaacgcaaccgtccatttatagttagtaaacactctaaacttgcgcggataatcttttttaagaaagaatggaaatgcaccgatcaagaaaatataaggtgcagtagcggctacgttacccatatccgtcagaatttgataaaagctagtcgctgcgctaccaccgaatgagaccaccgcaattaataggcaaacgaagacagtttgagcccacatcgcattagcaggaataccgtgtttatttaatttagtcgctgccttaggccataaacgtggatcagatcccatgatgaaggatttaattggtgaataaagcaaaacaaagagagcacctgtcattcccatcaaaccagataaagcaattgctctagtaaagaatttaccaatcaataaactcgtgttaggatccaaatgaagtgcggttccaaaggctttgccaagtgtgccatatacggtatacgtaatatttccagtattggcattggctgctaaaatatctttttgataattaactgaaaagccggtcataaaaatcatcaaaacataagaaataatagtgaacaatgacccaataattaagcctttagggaaatctttttctgggtgtttcatactgtcaatcacaccaccgacggtttccatcccaccatatgcaaagactgcataaactacgaaagaaataatcgtaattggcgtttgaaaacttttattaggcgaaataataaaactttgccacccagtaatcggctgagccaattgcccatgattcataatcaagaccgttaaactagctagaataaagactgcattcattacaatcatgaaccaaccaccgattgatgacataattttaattccagttatccctctggaagacaggtacgttgatacaatcatgaataaaattgctagtacacctatcaattgagtaccatgcaagcccaaaatattccattcttgagttgtatctttgccaaaaataagggcagagattgaaatccaaagccttgaggcgcttgcaaccagccacagcacccagttagccagccatacaaaagtcccaataaaggcctatttttgtccaactgagccagctaaccatgaataaataccaccttgagcatcatgaaaagcagacccatattctgccatcattaagccagctgggaaaaagaaacagacgccagccaaaataaaccaaatgatcccagcatatgtcatttgctcataagaaacagaaacattgccaaaaccataaaccgttgtgataatcatcaacacaaggctcatagtcgtcaatgattttttagtttgtgaattttcatcatccaagataaagcctctactttctatttacactttccattttagcatcgtttatcttgaataaatttattctaattttaggctcataagaaaaaactactagttattcactagtagcccttcatttttattcattaattcttttttcaatccaattacttaattcagttacatgtaatttagtgaccgaactaaaagtcaaaacggtgacatgatcatagttgagattcaactttttctttaagcctgacatcaccttattagtttgactcttttttattttatccatcttggtacaaactaccaaaattgggatatttagatattgagcataatcatacatagcaatatcatctttggttggttcatgacgactatctactaagataattagtccctttaggttgggtctagtttctaaataatcttgaatcatttcgccaaattcttgccgcttcttctgtgaaactttggcatagccataacctggtacatcaaccaaataaaatttttcattgactttgtagaaattcaaagtttgtgtctttccaggctgtgacgaggtcctagctaagtttttacgctttaatagggtatttatcaagctggactttcccacgtttgagcggcctgctaatgcgatctcaggcaagttatctttaggatattgatcttctctaacagcactaactgcataactactgctttcaatgatcattgacacttacctgttctttattatcagtatttttgcggattacctttggcttagcgtgcttagtaattacgtccttagttacttcaacggtctcaatatcctcttcactaggagtttcatacataatatccataattgaattttcgataattgttctaagtccacgtgcacccatatttctttggattgctaagtcagcaattgccttcagagcaccatcagtaaacttcaaattaacatcatcaagtgataacaacttcttatactgcttaactaaagcattctttggttcagttagcactctgaccaaatccttactactcaatttatcaagcgtagtaataattggaattctaccaatgaattcaggaatcattccaaatttaactaagtcagctgtagtcaaatggcgtgtccaatcatctgcattaattttatctgcctcattttcagcaccaaagccaatggtctttttacctaaacgatttttaacgatttgttcaattccgtcgaatgccccaccaacaataaatagaatgttagtcgtgtccatcttaatcatttcttgttgagggtgtttacgcccaccttgaggtggaacagaggcaattgtaccttccaagatctttaataatgattgctgtacaccttcacctgaaacatcacgcgtaattgagacattctcagattttttagaaattttatcaatttcatcaatataaataatgccacgctgtgcacgttccaaatcataatcagcattttgtagtaacttaagcaaaatattttcaacgtcttcaccaacataccctgcttcagtcaaggtagttgcatcggcaattgcaaatgggacatttaaaatacgagccaaagtctgagcaagatatgtcttacctgatccagttggtccgatcattgcaatatttgatttttgtaattcagttgaagaatcaacatccatttggctaattctcttatagtgattatatacagcaactgataagacttttttagcacggtcttgaccaataacatattgatcaagttccttttttatttcaacaggcttaggtaattcacgagctgctttaagtgaatctgctcgtaattcatcgtcaataatttttttagccaagtcaacacattcattacaaatatatacaccgttaccggcaatcattttcttaacttggtcttgagttttgccacaaaaagcgcatttaatctcttcttgatctgtaaactgatttgccattatttttcctcctatatctaccaaaaatcagattatcataaattaactaatattgataaatattaagctcgaacagcaaaaaaagcggcctatagccgctctttttgagaaattagcaaatattactattacttgctttccttcttgtcatcgtcttctttgttttcaagctttgacttagcaacttgcttagcattatcagtaataagatccatagccttacgtacagtaatgtcgtggcctaacatgtcatctgataaggtgttacgtaccatcttttcatccatgttgtattctgaagcaagatccttgatttctttatcaatttcttccttagttgccttaaggtcttcagcagcaacaatagcttcaagaactaagttagttttaactctttcagctgcattcttttcaaattgtgaacgcaattgttgttcgttggtattagtcaacttgtagtaagtttgtgggtcaataccttgacgttgcatattacccaagtattggttcaattgagtatcaacatcttcttgaatcatagcatcaggaatttcatcgatagtagcgttgcttacagcaccttcaattgcagcttcttgaatagcgtcgtttgcttgttgttccttttgttccttcaagtccttcttgatcttttcctttaagtcatcaagggtgtctacagagtcatcaacgtccttagcaaattcatcgtctaacttaggaagttgctttgacttaacttcgtgaatcttagttgcaaagtgtgcttctttaccagctaaatcctttgcaccgtaatcttcagggaaagttacaactacatcaacatcatcgccggcttcatggccttcaagttgatcttcaaagccaggaataaatgcacctgaacctaattcaagtgagtagttttcagctgagccgccttcgaatggcttgtcgtcgatagtacccttgtaatcgatagtaacagtatcgcccttttcagccttacccttcttaagaacaagttctgcattttgttcacggcgcttgtcaagttcagcatcaatgtccttttggtaaacacgagtgttttgcttaggaacttcgatacccttgtagtcacctaacttaacttctggttctacagtaacagtagccttcatagtccaatccttgtccttatccattgatacaggaacaatttgtggttggccaactgctttaatacctgcttctttaacagcagcagaatatgcatttggtaatacaatatttaaggcatcttcatataatgcttcttcaccgtaatattgatcaaagatcacacgtgatacgtgaccctttctaaagccaggaacacgcaagtttttctttactcttctaaaagcttggtctaaacctaatttaatttcatcttgtgaaatatcaaaagtaagatcaccggttgtcttaccggtcttttcccatttaacagacattaattaaatacctccaatgtcaaatttgagtttgcatcttgcatactaagttatcttaccttaaaaggccgcaaaaaacaaatttaaaagaaaaaagatgcgctcctgtgaagaagtgcatctttttttaactatatcgttagaaattagtcaaggatttcagtaacctgaccggcaccaacggtacgaccaccttcacggatggtgaacttagtacccttttcgatggcagctggcttgattaacttaacagtaaattcagtgttatcaccaggcataaccatttcagtaccttctggcaattcaatttcaccagtaatatcagtggtgtggaagtagaattgtggacggtagtctgagaagaatggggtgtgacggccgccttcttccttcttcaagatataaacttgacccttgaattccttgtgggtttgaattgagcctggagcagccaatacttgaccacgaacaacttggtcacggtcaataccacgaagcaatacaccaacgttatcgccggcttcacctaagtcaagagtcttgtggaacatttccaaaccagtaacaactgacttaagaaccttgtctaccaaaccaacgatttcaacttcgtcaccgaccttaacagtaccacggtcaatacgacctgaagcaacagtaccacgaccagtgatagtaaatacgtcttcaactggcattaagaatggcttgtcagtttgacgttctggagttgggatgtattcgtcaacgatgtccatcaacttaagaatttgttcttgagcttccttgtcgccttgtaaagcctttaaagctgaaccacgaacaactggaatatcgtcaccagggtaatcgtattcagtcaacaagtcacgaacttccatttcaactaagtcgatcaattctgggtcgtcaactaaatcacacttgtttaagaaaacaacgatgtagttaacaccaacttgacgagcaagcaaaatgtgttcacgagtttgtggcataggaccatcagttgcagcaacaactaagatagcaccatccatttgtgcagcaccggtaatcatgttcttgatgtagtcggcgtggcctggagcgtccatgtgagcgtagtgacgattttcagtttcgtattctacgtgggcggtattaatagtaataccacgttccttttcttctggtgcagcatcgatttgtgagtaatcttcagccttagccaaacccttgtcagccaaaacagtagtaatagccgcagttaaagtggtcttaccgtggtcaacgtgaccgatagtaccaatgtttacgtgtggcttagttctaacgtaatgttctttttctgccattaaaatgaccctcctgtaaatttgcaagaagtccgttgagataagttaacggataattctctgttgaatattgtactactttcttcggcaaatgcctagtaaaaaagcttaagcgaaattgcctaacgaaaatatcctttgctaattatactaaatagtttgaaaatgtaaaccttttttacttattttttattgcggtaagtatttatatattttttctagtaatttttgatgactacggccatcttttctttgtaaaaatgagactaaatcactagcaaaactgtcaggctcatcaatatattggttaattttagggtaaagactgcctaataccaaattcacttctcccagcattaatggcaactgacttggactattgtgaaatttgcttccaatgctagaaataatttcacggtacttaggttctttttctagaagcagtgtattcgccggaataaagctctccatctggcctattacccaaatttcaaacttttcttcaagtcccaagcgaactaagtcttcacaaagtgacaacctaacagcaaaatctggcgttggatctaataagacgcttcgtgcaaaagctttaaaattaggcaggtttaacttatgtaaactttcataatccgactgagtaacctgttctcgttgtttaaagttttgcataatctgccgctgtttttcttcagaagctggttttaccttttctgataagtccacccaaacaagattttttagttgtagagcttcaataaaaaaattatttttagctagaatttgacagtaacttttaaatactcgctgatcagaaaaaagatcaggctcctctttaattaaagcatatgcctgatcttcttgtttattagcgcaatagagtttgcagagtttcaaaataacgtccaatgaatgctcttcacgtaatgcttcttctagattttgaatagctgcttcgagatctcccttacgctcatcttcttcagcaagtttcaataaattttgttggcttactgatgtcatttttagtctttcttattactttcttttttcttatttattttttttattttcgtctttggcatggttcttattgtcattttgtgctttttcattgcgtttctgcatagcacgatgacggttttgatttacttccatgaccacgggcaagatcactggacgacggttagttttcttgtataaaaacttctccaaatcaccgcggatatcttgcttcaattcagtccaatcaaactttttgtgttcaaaattggcctgaattgcttttttaattacatcaattgaatcactcatcaactggcgattagccttgatatagacgaaaccacgactagtgacttttggctctgcaataatctttttcttcttacggtcaattgtaacaaccgcaataaagattccgtcatctgataggacctcacgatcacgtagcacaatattaccaacatcaccaacaccagaaccgtcgatcatggtatcttcacctggtactgggtcagttaagaagaaacgcttctgcttaaagtcatattcaagacagtcaccattcttggtaatataaatatctttaggattcattccagctttaatagccaaatcacgtactacttcaagtaaacgatattcaccaattactggaattaagaattttggcttcaaggttgtaatcaaaagttgcagatcacgaccagttgcatgcccactagtatgtatatttctgcctaactggataaccgtaccgccagccttatataccaaatcactggtttcagctaccatcgtttcaaccgcatgtgacggagtagttgcaataaagaccaaatcgcccttatgaatcgtaatcatactatgacgcttcttagccattttttgtaatgagttaagtggttcacccatacgcccagtctctaatataactgtctgctcatctggcacagtcttcagatccttaactcgcatcaacaagccttcaggcacatctaaatagcctaatttcattgaagttctaacaatcttagctagatcgcggccagttaataagacgcgtttccctgttgctgctgcagcatttaaaacttcttgaacacgattcaagttagaggctttagcagctacgataattctgcctttagcatttctgaagacattagtcacaaatttaccaatatcttgttcagatgcattagggaaagatgcttctgcattagatgaatcacttaaaagcgctaaaacgcccttttgttcaatttcagctaagcgatccatatcagtccgataatttaacgcagctgttggatcaaatttaaagtcaccagtataaacaatttcacctgctggtgtatgtacatctattccaagtgaatcaggaattgagtgtgtcgtatggaagaatgaaatacttgcattcttaaaatcaatttcagtatctgcatcgattacgtggaacaaactattcttacggcgtttgttttcgcgttgtacttcaattttagcaagttcgatactcaattgtgaaccaaatactggaatatcgtatttacgcaaaatgtatggcaatgcaccaattgaatcagcatgcccatgtgttaaaaagatacctgctactcgatctccgtattgttcaaagaaatcaaggtcaggaattactacatcgataccaaataaagaactatcagggtactttaatccggcatcaagaacaaaaatttcatcattaacttgaacggcaaacatgtctttaccttgttcacgcacaccgctcaagatcataattttgatttgatcagccattatatttccttttctatctaatttttaattcttatggatctatcgatctcaacgtaaaaataatctgtttcaattttagcataaagaataaaattatgacagagacaaaaaaagccagccttttcggctagcttcattattcaatattatgtgaaaattaacgacgaagacctaacttcttgatcaattcacggtaacggttaatgtcgttgttttcaaggtaacgaagcaagttacgacggtgaccgatcttcttaagcaaaccaacgtatgagtggtggtcatgcttgtgactcttcatgtgatcagtcaagttgttgatatcagcagtcaaaagagcaacttgaacttcaacagaaccagtgtcaccttcgtgagttgcgtattccttcataatcttttctttttcagtctttgaaattgccatagttaaattcacctttcattaaataattgccgttaacaacgtttatcgtcggcgtgaacaaataaacagcgttagcggttcacaacagtcataatcatacacattattttttaaaaaagcaagcagaaattaccttgcatccgtgatatttcttaagtataatggatgaagtaaatttctaaatcattggaggtgaatttcatgccacaaatcaaatcagctatcaaacgtgttaaggctcaaaatgctactaacgaacgccgcgcttctgaattaagcaagttaagaactgctatcaagaagtttaagaacgctgttgaaagtgatagtaaggaagacgtctccaagttgcatttagaagctgaacgtgctttggataaggctgcttcaaaaggcttaatccacaagaacaaggctgctcgtgacaagagtcgtttaaacaagttagcaaacaagtaaatcttacttattactaataataaaaagaggagatctgcagtgatctcctctttttgtatactcttagacatttaagatacgcgtggtgctagttaaatcgttctagacaatatgccatattataagctaaaatagctatttctagccgttgttgaaaacctactaagctcctggctcgattattctcagcattgtaatagctaagcaaagaaaagtcgctttcgattgttcttctaattgccattaactgatgatcattatgctttttagcacccctcatgtttttacgatatggtgtccaaagcacgtatcccatacgctttagcttggctgctaagtcttttcctaaatagccttcatctcctaaaagataatggttaattggatgagcattgatcatcaattctaccgtctcttttgcatcatgtaccgacgccttagtaactgcgtagtcaagcagatagccatcatcactcactattgcgtggactttgaagccataatagtagatttttttcgtcgctttataaccaatatcggctatgccacggaagatcttaacgtgataattgcgaacaggctgacaaactggaatcggaaaactgtcgataatcaataattctccacctacctttacttcctgattccaaccctgacggatacaacgaattagaggcaagagcattcgagctcgacggttaaaacgagaatgagataagccaacgaagaatttacagaatcttcgttgagattcaattccaatttcagtttgccaaatgagcatcgctaagatagaactatcaggaagcttggtctgatcaacatttttacgatgtttaagtccatcaggcgcataaagcttatacagcgagcgacaaatcacatttaaccgattaaaactaacttgtaaatggtgagaaaaacgattaagcttgagatagttcaattagatcagactcttttctatttaaattacttacaacttgagtctagtctaattggacttttttattaactaaaacgatttaactagcaccacgcgtatttaagataaataatttcaaaaaattatcttctcggtaagttccatttttatatttaaattctaagtcgattgcatcccttaataaattttctagcttgtctatcttcaaccgattacgtagggctaacttaaccctatagggatgaacgcctaattcttttacaatttgtggttcgctacgacctctttgtgctaagatcttaacgaccaaaatcaattctaattgattttcaaagaccgctaataattgaattggattagtcccttcacgtaattgattatctaagcgctcaactgcttcacggtaattcttatctaaagccgactccaaaatagcgaaaatattttgtgctagggacaaatctacattttgcattactgatttttcagtaattttgttatcggtagctaccatttttagcttttgataattgcttaaaatagtgtcaattacctgatcactccgctcaattagcagctgtaaagctgactgtgtgattatatatccctcatctttgatcaaggctttagtcgttgaagcaacttcatagggcctaatttgtggctcaaccacattgaattgctttagaacagttttagtcagttttttacgcctatcaattttttcataagaagcaacaattactactacatcttctaaatcagctaagttttcaaaaatcttttgtaagtcatcaatttgtttctgtaattttttagataccttagctgttaaaaagaaaggatttttgactacaataaatttctgttcactaaataaactggattcagttaagctcgcaatcaattcatctaagccatcgctttcgcaatcgacagtcacgtgctccaaatctttaaagcgatcttccttggcatatgatctcaccaagtaatcattgagaaagtcatctgcaccccaaattaaggtatgtggattattgttatttgtatttttaaacaaagaaagtaaggtcattttttatcccgctttaaaaagtaactaaatctaggactttgcagtccgccataataccagctaatcataccacagtcttgcgttgaaacccatggtatttgctgttgagttagtgtcgttagcgtctcttgatgggggtgcccgaacctattttttcgaccagcagaaataaaaacttgcttaggatggattgcacgtaaaaagtctggattggatgatgttttactgccatgatgacccaatttaaaataatctacctgaagtttcatcctctgcataatttccttttcaccatcttgacctaaatctcctgtaaacaaccaattcttattcgctactctaaaaagcaaactcagggaatcttcattctttccttctcctgcttgatatggataaaccacattaaatgtaatctgcggttctttcacccgcattcctgcaagtaactccaataatttggtatcttttacacgaccatctaatctcttttgaaaagatggattcttaattagtccttcggccataaataatttcttaacattaacctgctctagtaatggtcctaaatcaccaacgtgatcggcatcttgatgcgaaacaaagactccatcaattgtattaattccctgacttttcaaaaatggaatagtaattcgatcaatctgaggtgtctgctttttgccactaaagtttagtttcccaccagtatcaattaaatataccttgcgaggaaatggcgtagtcactagaatactatctccttggcccacatcaatgaaggttacttgccctcgcaaaggaaaatgaatcatgctgaagaaaattacatacaagctcaacaagcccaccataattttcttactattaaagcgccagttaactttttctcttaaagaaacaattaaaataatcgttactattaatagcaacagacactgccaccaattaatttgcccaaaagttagtagtcccaacttagtagcagataattgcccaatgattttctcacctaattcaagcactttttctaataccggagcaaaatctttagtcagaccaaacgtcacaatattgaaaaaagcaattggtaaaactatccaattgaaatatggcactactaacatattaaaaattacagttaaaaaattgacctgataaaagaaaagcaatagtaatggcgttaataaaatatttaacaaaattgcttgtttaaaactgccaaacttatcagttaactgtaaacccaatgccaaaatatagctcaataaggctccagttgccagaaataaacgcggtactactaaaagatgtaaaatgcaggtcaatcccagcagatctatcgacgcaacatgatatttcttaaacttacaaattttgcctaaaaagtaggttaaactagctcttacaaagccggcttgaccattgcttagaaaaatacctagcaataaaaccaatgtacagcagacaaaagtttcttcatccgtcagtttcaagttaaaacaaaatacactaattaacaagacatagattccaacatgtaagcctgaaatgcttaacaagtgaataacacccaaatctcgataattatttagtatttcttgattttcttgagcattattttcacccaagattaattcactagcgaaaaagcctaataactgtggcatcttggcaaaatagttctgcaattcaaaacgtaattgatgcaattgatccccaaaatcagtaatcgataatagcttcatttgacaactactgtatttcaatttttggtaaatctgttttgcctgataataattctgaaaattaaactcaccaatattagttgctggctcaattgaattgcattccccattaatttctgtcactaaaatagggttcccatgcttaagcagttctttttgaacatctgttaccttgccaccaattaaaattttaccttgagcgaaattacccacacctgttaagtagtcgtctttaattcttacctgatcagggtaaattcttaattggctctgctgggttaaaacaaaattggtttttggtttacttaaaaaaatcagtaatagaaatgctccaactattagactaactatttttaaactaactcgatatttttgtactaacagtagcaaaaagtaacccagaaaaaataaagctactattttttgcaccattgttgtacaagaaaaagccaaaaaagagattgtaattagcaacaaagcggttattaagtaaaagccaacttcatttttaaacagccaattgatctttaaggctcgcaaaagttttttctcctattcctgatacctgcattaaatcttctatctttttaaaagaaccattttgttcacgataagcaataatctgttctgcctttttttgaccaattccagttaacttttgtagttccgttacattagcagtatttaagttgatcttagtgccatccccttgattacttgggctactgctactagtactcccactattttgactattatcagctgatcctgcagttgccacattttcaaccttttcacccttgtaaggaatatgaattttatcttgatccttaagcaaagtagcgcggttaatagcttttaattgtgctctagcagtagtacctccagccgcctcaattaactcctgcagacgagcaccatttttcaatgtatatactccctgatgcttcaccgcaccggaaatatcacaagttacagtcttagaaacggttgttgaactactgctagtcactgcattagtattagtggttgcacctgaactactagtgctagactgcataacttgatcctgcactgcagcagcattttcttgatgatcccctttcttcaatccataaaatccaactacaagaattattgcaccaatgagatatgcttttttctcaagcacaaattcttttactttttcaaaattcataaaaatcacctctactatttattacgcaaaaaaagcccagaattttttctagacttcaaattttttgaatttttttagtagtgtgtctttagatagtttaatgcatcatcaaaagtgctcacagggacaattttcattttggtgtgaattttctttgcggttctcttagcaaccgcataattagtttcacttttcttcacactggttgaatcagtcggcgcaaagaagacctctgcaccttctctgctagcagctaccacttttttatcaacaccaccaatgattcctacttttccggtaggtgaaatcgtacctgttcccgcaatcttatgtcccttacctaagttctgcttggtaaagacctcatagctttcaagtgtaaacatcaatccggctgaggggccaccgatttcgccagcattaatttttaacttaggcttagttttcacaactacatgctcaactaattgaatcccaattcctggcttattagtaccctttactttaacaattttgccagtaaagtgtttctcttgcttaccacgcaaaactgagattgttactcgtgcaccaatcttttgtttacgcaaataatccatcatctcttcagttgagctgaaacgatgcccgtttgcgcctaaaacggtatcaccaatttggagcttatttttaaaactagaatttttctggacttccattacataaacgcctagatattttaagctatgctggttacctgcttttttagctgcataataaattgcattctgctgacttgtttccatataccagttttgcaactcattatattgagcactagtttgacctcctagcagctccttgcttgatacacgctcatcatacggacgagtaaaactccatagatattgcaaaaccggagccggccgactagttatgctaactgtcaccaaataaaaattattcggacgtttatttgatgacttaataaactggcccacgggcattgcctcaccaggatattcaatataataatcggtcggccaaacagcaagtaccactaataaaacaagcgcaattagtgccaagagccaattacgcaagtgctttttcgattgattgtttttcttattattcatgttttagcttctctctcaatgcaatcgctgcttttttaggtaaaaacagactaacatcttcatcaaaacgagctaattccttaatcatgcttgaagctacaaaagaattttctggactcgtaaaaagcaaaactgtattcacatctggagccaattttttattaatcccagcaatctcctgttcatagcggaaatcagcactgttgcgtacaccgcgcaccataactttagcatgcaattcatgtgctaaatttacagttacttcttccggtctttctagcacttcaatattaggtatttcccttagtgcatccctgattagatcagcacgttcttcaggcgtaaacaagtatttcttagctgtattggtcatcgcaactacatatactttatcaaaaatttcagcagcctttttagcggtctccacatgcccattagtaatcggatcaaaactccctggaaataaagcgattgtcattattagtcctttcgataaatcctcacaattgtttttcctaaatggtgttctttgatcaatgaaaaaccagtaatttcacccagttctgtatgatcatcagtttctgctaccacaattgcatgatcattaagtaggttcgactttaccatctgcaacatgtccttagcgattttttctttggcatagggcggatcaagaaaaactagatcaaacttttcatcattctcagaaaataattttaatgctgcagagctgcgcatattataaacattaaaacgctgctcttccttagttaaagcaacatttttcttaataattgtacaagcagcatgattaatatcaaccagactcgcatggtcacagccccttgaaacagcttcaattcctaaggcaccactaccagcatataagtctaaaacattaccaccctgaaaaaattgtcccaatgaattaaaaagggattctttcaccttatcactggttggtcttgtccgattacttttcaaagtaaataaatttcttttagcatatttccctgaaataattctcattttagttgattctcacttttttcttgttcaagttgcaatttcttttctgctttttgggccatctcagctaattgattttcaatatgttggctatccaaatttacttcttcttcagctgaaatttcgacatgattaacaaaatccaaatgagcaatttgtcctttgatttcattgcattcgttgcgattaacataaagaacacaatatttcatttttttagaaaaataaacaatgtcaccaaaatggcgcaacttatattgatcactaactgattttaaataaataatcaatgctacccttttaattaagtgggtactttcaatttctttattgatactcatgcaactgtttcatccttttcctgtaacattttttcatttgctgaaacgttcagtactaaaccaatcgcagcagtcaagacaatcattgatgaaccaccatatgaaataaatggcagcgtaacccccgtaatcggcaacaatcctagtactgcaccgatattaaagaatgcttctgtaaaaataatagtcgtcacgccaaagcaaattaatgcgtcgaattgagaaaccgcgtgaaccccaacttccataatctgccacatcaaataaaagagtaatccaaccaataaaattgtcagaatcacacctacttcttctgctgtaatggataaaataaagtcggtatacggctctggtaagtaacctcgcttttgcatactattacctagtcctacgccaaataatcccccattgtggattgcataataggagttaactagctgggccccacctttttgctctaattcaaagggatgcaagaacgacattagtcgttggaattgataacttctttgtaaaaatccaggattccaggcaactacaataaaaaatacagctgtcactaagatcacaatcccagctaaccaagttaaagctaatttagttggaacccctgatactgaaaacattactaaagtgatcataaataaaattgctgtcccaccaaaatcaggttcaacaataaccaaacacattaaaaaagccgccaaaattgctgggtgtgacaaattatgtttgatcttacccttgactaattttccatctcttctgtctagtacatatgacaaataaatgaccagagccaatttagtaacttctagtggctgcaaattgataaagcccaagttaatccaacctacagcaccattaactgccgcactactgccatgagcaaaacgtagaaatactagccatcctaacataagtatacaaattaataaaaatccccctacaaactttggatttttaaatactttgattcttaatgcaaaaaacggaatcccaaacaaaaagaaagctactatagcatagattgcttgccgtatcccatagacatttggcttaaatccattaactaataaaatatctgaactagctgaatataccaaaattatcccaaccactactaaaataagatagggaataaaaatctggtaattaagataacttaattttcgacgcacaagcgttgcccctttatctaaataatacttttttcattataaaacaaaaagatcatcacttctatcaagtgacgaccttttaaaatttattaaactatcttagttagcacggttacgcttcttatcagccttttgacgttctgaagtgttcaaaatcttcttacgtaaacgaatagattcgggagttacttcacaatattcatcatcatttaagaattcgatagcttcttcaagagtcaacgttctaggagtcttaatagcagcagcgtggtccttaccggcagcacgagtgttagttaagttcttacccttagttacgttaacagcaatatcacgttcacgtgatgattgtccaacaatcataccttcgtaaacttcaacaccagcaccgatgaataactcaccacgttgttctactgattgaagtgagtaagtagttgattgaccttggttaatggataccaatgcaccattacgacgacctgggttccagttctttactactggcttatatgcttcaaaggtgtggttcatgataccatatccaccagtttgtgacatgaattcattattgtaaccaatcaaaccacgtgatggaactaaaaattcaagacgagtttgaccattaccagttgattccatattcttcatctcaccttttctttgtgaaagtgagtcaataacagaaccaacatattcatctggagtatcgatttgtactgattcaaatggttcgcacatagtaccatcaatttcacggtaaataaccttaggacgtgaaagttgtaattcgaagccttcacgacgaagttcttcaaccaaaattgaaaggtgaagttcaccacgacctgaaacagtccaagcgttcaattgatcagttggttcaaccttcaaagaaacatcggtacgagtttgacgaatcaaacgatcttcaagcttcttaggagttacttgatcaccttcacgacctgcaaatggtgaatcgttggcaacaaagtccatttgaagagttggtggatcaatcttaagaagtggcaatgcttctggatgttcagctgatgcaatagtttcacccacgtagatatcattaataccactaatggcaataatatctccagccttagcttccttaatttcgttacgtttcaagccaaagtaaccaaataacttagtaacacggaagttttgagttgaaccatcacgcttcataacagtgatgttgtcactaactttaaccttaccacggtaaattctaccaacaccgatacgaccaacatagtcatcccaatcaagcatggtgatttggaattgtaatggctcatcagagttgtctactggagcaggaatattcttaataatggtatcaaagattggatccatagtttccttttgagtacttggatctggatcatatgatgaagtaccattcaaagctgatgcataaacaactgggaagtcaagctgttcatcgttggcacctaattcgatgaaaagttcaagtacatcatccaaaaccttcttaggacgagcgcctggacggtcaatcttgtttaaaacaacgataggttttacgccagcttccaaagctttctttaaaacgaaacgagtctgtggcattggaccttcataggcatcaaccaaaagcaatgcaccgtcaaccatgtgcataacacgttctacttccccaccaaagtcagcgtgacctggtgtatccaagatgttgatagtagtatccttatacttaacagcagtgttcttagacaaaatagtaataccgcgttcacgttcaatggcatttgagtccatagcacgatcttccagattcatgtgttctggcaaagtatcagattgcttcaataattggttaaccaaggtagtcttaccgtggtcaacgtgggcaatgatcgcaatgtttcttagatcgtctcttcttttttctgacaaaagtattcctccccactcttcaataaaaaaactgtgactctgtcacagtttcggtaacgcattagcgccttatcgaagtgcttttcttaaatctgtatagttacgttagtgaattttaccacctaactgcatacgggtcaacgcttaacaatcaagttaaccctggatttttttatgcaaaaacaagcaaaaactattaaactatggtaaaaatataatgtagataataatttttaaaaaggagtaattattttgatcttaatgaaagatatcgtacgtgacggtgatcccgtcttacgtcaagttgccaagcctttaacatttccacttagtgatcactataaaaaattagctgatgatatgatgcaatacttaattgattcacaagatcctaagattgctgaaaagcaccaattaagagcaggcgttggcctagccgcacctcaagtaggtgaaggtgtacaaatggctgcacttttagttcctgatgatcaaggcaaaattatctttaaagaagtttatgttaacccagagattgtctctgaatctgttcgtcaagcttgtcttagcgaaggtgaaggttgccttagtgttgatgaagttattaatggttacgttccccgccctgataaattaaccattcattactacaccgttgacggtgaagaaaaaaccattcgcttaaaggattacccagcaattgtttcttctcatgaaattgatcacttaaatggtcacttgttctatgaccgcattaataagcaggatccattcgcacttaaagaagatacagtcgtaatttcttaattgttatttaaccaaaacaaaagcctgcagatgcaggcttttttgtataaaaaaagtcactggttaactaggccagtgactcatacattgggaattaagaagattgaagagacttcttataacgagcaaatgaatttattaatcatttactacatgattatcgtacaactgatgttattttacgtcaataacattgaccaaatttaagaaactgtcaaatcttttgtgtaaatagttctttctcgtaaattgattttttaattatttatttaatcaaagtaggattctaaggtgtcctgaacctgaccaaagcctttatgaattcgattgaaataacggtcattgtagctcattgcctgaatgccaataaaagcatcaagcgactgttcagttggaaactatgccttaggcttagctttgcgcttgatcacattgttaaatgattcaatcatgttagtcgaataaattgaagctctgatctgcttgggatagttataaaagaccagcagatctggttctatgtctttcaagcttctgataacatggctgtaaaccttgccccatttggtatagaagtcatgcaggacagctgtggcttcttctttgtttgtctgttgatgcacctgtttgaattcgttcatgatcttttcacgatcgtcgacgcgtactttagcgcagatattgcgcatgacatgaaccaaacagcgttgaaaatgagctttaggataagtcctggccaaggctgttttcatgccaacaacaccatcagaaagaaaaagctcaacttgctttaagcctcgggatttcatgttttgaagcatatctgtccagacttcaatgttctcgctaggtgcaatgcagtagtcaatgacctccttgtgcccattaggcttgatgccaatggcaatatagactgcttcacgctcaaatgtttctcggcgcaaaggaaggtatgtcgcatccaaatagacgcagaaaaacttgtcgcttagcttgcgtttgtggtaagcctcaacctttggaatcatctgcttggaaatatttgatacctgagctggactgtaatggctgccatacatcttttcaattagatcggctatttccctggtggtcacgcccttggagtaaagcttgataatcatgctttccaagatatccgagtgctgcttgtagtcaggcagcgtgtgctgatgaaattgaccgttgcgatcccggggcacttgcacttcaattgggccaaattgcgtatcaactttgcggaaataagcaccatttctagagttgccagtattccagccatttctggcatagggatcatagcccagaaaggcggtcaattcagcttctaacaagttattaacagcctgttgtagctctttgcgcaataaatcatttattttgtctggattgaatagagcttgagcaaaatctttggtaaaatcattcatgaaggagttcttctttctgtatgtgtttttttgttcaaaccaatcatacgagaaaggaactcctttttctaatgtttaaagaaataaatttaaggaatcattcatccttacacaaactattttacagtctcaaatttaatcggtaaaaatcaaaagaaacataattatatacttaactttataattatgataaaatttttatagctattgagtaatttttactctacattgaacgtttatacattaataaggagaatcatttatgatttacaaagttttgtatcaaaaagacaagattgtcaatcctcgtagagaaactacacaaactctttatatggaagcagacaacatggtcgaagcaagaagtatggttgaggacagtaccccctataacattgaactcatccaagaattaactggtaattcgttaacttacgaaaaagaacatgctgactttaagttaacaacgttcgacaagaagtaataaagagtgcgaattaaaaataatgaagtagccgtttatgcaatcgggggtttgcatgaaatcggcaaaaatatgtattgtgttcagtatcaggatgaaattatcatcatggactgtggtattaaattccccgaagataacctattaggtattaattacgttatttcagactattcttacctaatcaagaatcgtaagaaaatcaaagctcttgtggttagtcacggacatgaagaccatatcggtggtattccatttttgttagaaaaaattcctgaaattcctgtctatgcgacaccatttgccctttcattaattagaggcaaattggaagaacacggaattttaaagacaactgaactacacgaagagcatgaggatactgttttgaagtttaagaaactttccgtttctttctttagaactactcactctattcctgatactttaggtattgccgttcatacaccactcggtgccgttgtctttactggtgactttaagtttgacttaacaccagtaatggatcaacctgcaccagattttcaaaagatggctcaattaggcaatgaaggtgtacttgctcttctctcagattcaactaatgctgaagtaacacaatttactaagtctgaacgatttgtagctaagtcactacataatatcatcactggaatccacggtagaattatttttgccacttttgcatctaatctttatcgtgtatcaactgctattcaagctgcaattgataccggtagaaaggttgcaatttttggacgtagtatggaaaatggcgttgataatggggtcgacttgggctacttaaatttgcctaaggatctaattgttgacgtagatgagatcaacaaactaccacctgaaaaagtaatgattttatgtactggttctcaaggtgaaccattagccgctttatcgcgaattgctaatggtactcaccgtcaaatcagcttacaacctggtgatacagtcatcttctcctctaacccaattccaggtaacacattaagtgttaaccacttaattaataagttaatggaaggcggagccgatgttattcacggaagagtaaataacgttcatacttccggacacggcggccaagaagagttaaagatgatggttcgcttagttaagcctaagtacatgattcctgttcatggtgagtacagaatgcaggttattcacacccagcttgctcaacaagccggtgtacccgctgaaaacacttttgttttatctaatggtgaagttgtctgctttggccctgatggcgctagaatcacaggacatattcctgcaggtgacgtttacgttgatacttctggtactgcagatgttggcaacgttgttgttcatgatcgtcaaattctttctgaagaaggtttagttgttgcagttgctacagttgattataagcacaagcgagtcttagctggtcctgatattctcagtcgcggatttgtctacatgcgtgaatcaactgagttaattagtcaagcgcaaaagcatgtttatcatgtgcttagaaatgaaatggctaaatcaaatagaccaaaagaaagtgacattaaaaaggcgatcaccgaaaatctttcagacttcttgtattccaagactgaacgacggcctatgattttaccaatcattatcgaaaagaaatagtaaaaaagactccttagggagtcttttattttagaaaatgaataatatgcataaaaaaattaaagttcagttattagttaatgaggtcgctgggaatggcaatgctattaaagctgataaagaattacaagatatactaaaagaaatgaatattccttttaagcgacaaaaaagtcattatcctggagaattagtcgttctagcacaaaattacgctaatttacatctctcttctgaacatgttttaatcgtagttggtggagatggctcctttaatgaagttttaaatggaataaagacttctaattatcctgagacagctattacttatttgcctgcaggaacaggcaacgattttgcccgtggtgctggattaaccgcagatcccaggcaattaatcaacaatttgctccgagatcctgaaccggaacaagttgattgtggttttttcacatcaaatattaaacaaattcctaagggttactttgttaataatttcggtattggttttgatgcctttgttgttcatcagagtaatcatgagcaattaaaaaaacacctcaatcacctcaattctggaaatatgatttatggcctaaatataatcaaggcactaattaagcaggatacctttacagtgactgttaaaactaaaaacgaaactcttcgttacggagatgcatactttgtcactactactaaccatccctactttggcggtggttttgctattttgccaaaagcggacatttacagtcaccatcttgatacagtaattgttgaaaaaccgagtttacgcaagtttctctggctttttggtaagctgatcaaagatggttcacacgttaatgcaccagaatttcattatattgaagctaaagaaatcctagttcaaaccaataaaagtgaatatgctcaaattgatggtgaagatattgaaaagcagcccttcaaagtaacatttaaagttgatcattttaatttattaaaataaggaagaattccaaattcttccttttttatatcttatctaaaatatctcttttcgaattatgattttgataatattggtcctgatcaacgaaatcatgtacttgatcataaaatttcttccaataacggtatttttgatactgcttttgccactcccgtgcttcctgcaagtaattaccaagaagtccattaatctgatcgatatgtttaatcacctgattagcatgatacaattgctcttccacctgcttttgagttaacgttgactcctgatcttcaaaaaatagaacattttcttgataatttttttcttcttgcaattgtttactattgtccatttcttctttgatagctgcaatttcgtctggctgtaatccaattccagttttagctttgactaataacgactgaatatctgccaattgcacaacatctatttccattttttgataacggttcgaatcagtcaatgtgaactcatcatctgttctacttacaaatacaaccacgtttctgattaattgatctatatttggcaagcgtctcaataaattaataatcactgggttgttgcttttttctaggacatatttaatactttctttatgcttggccacttgatcggctatctgatcataatcagcctgcacattatactgtccatttttacttgttcgtgctttggtttccaagcaaaaaatcccgctagtcgtaattatcacatgatcaatttggttactccctaaactattctttttttcatagggatatggtaacagtaaattatgaattatttctttccctgtctgcacttcacgtaaacgagaattcactaattcttctgcggcagcgcctgccaagagattgctaagatggcgcaaatcacgttgagataaaatattcataggtcgcaaatgttttatttgattcaaatgtagttcagtcattcttttctgaaatgcgtttactttttgattgtaaaccttatagccagaattaattgcccgaattcgtaaaacattttgcagagccaaagctcgtttcaaatcacgtttattattcaacaaagttttttcaactatcatagcatcatgaacagtttgtgaatcagttacttttttatgtgtaatccaagctttttgataactagcatgattttctaactcattcacatactgatttaagtcattttccaaaggcaaaattttgtttctaccttctttgactattgagccataatagcgcaaattttttgtaatttcgtctaactcattgaattcatgtttgccataatggtaagttaccttagtttctccattccaactagtcttacgccaataatgaccatccgtctcaccaaattcaactaattccgccactgaacgatctaaatagtacttaatcaaataatgacaatggcctttattgtcaaaaatgcgtcgcttaatataacccggtcgcattaattcaatgatctgaaaggtcaagttcttatgattaggaaaacggtatggtaatcttttgcctgcaattttttcaattttagttatttctttcttatctgttacagataattctatttttttcattttcttcttttttcgcttttgaaaaaaataataggttaataagcctattgttagtgtaattattgtaatatccatgttaattatccatattttggaacgtatgtttagacaacaataattataccatgattttgtataatgaaaaagccccttgttttaacaattcaaggggcttttatccttataatttgatattttccattccaatcattggatcaatttcaccagaatatattttttccgaggttagaacaaaatcttctgctacttctgctttatcggtttcattctccatttcttgagctttttcgtgctgcttgctttgatcagatttatccaatgattttgtaatacccaattgctgacaaatcttcgctgctaagccagtcttacgatcatttcccggcgtcttaaaagctgccacaaatgcccgtggatcaccaactaacactaagtttttctcagctcgcgttattgcagtatacaaaaggtttcgttttagcatcacaaaattctgcatggttagattcaagatcaccaatggaaattctgaaccttgtgatttatgaatagtgattgcataagcccgggtcagatcatttaaatcttttctagaaaaggcaacttctcttccatcaaaatctgcaatcatgcattccttggcatcatcttcatcaatgctaatgatcttaccaatttgtccattataaatatctttttcaggattattttgcaattgcagaatacgatcgccaattcggaaaacttcattatgtgcttctaataccttacttttaggctgagatgggtttaaaattgcctgaataacattattaagattagttacaccaccattgccaagatacatcgcgctaagcacttgaatatcatcttttgcaaatccacgttttaaagcaagtttaacaatttgtccaactgcatcccctactaattcgggacgacagctaataaaagaataattatttgttttcttaaacaatgcttgctgatctttaccctcattaacatcatgcgccaaagtaataatcgttgaatcatcaccctgtctatgaatctgcttcaaaatagtagttggaaacgcttgcgatttaatcaggtcactgaagacattgccagctccaaccgaaggtaactgatccttatcaccaacgaaaacaatatgccgcgtatcatgaatacttgccaaaagttgtttaaaaaggaacatgtcaaccatcgacatttcatcaacaattaagatttcaccatttaactcattcaagtcctgagtgttagtatcaccaatacctaaccccaacattcggtgaattgttttagcactgattccggtaatttcacccattcttttagctgcacgtccagtcggtgctgctagtaaaaacggaggatcttcactgtaaagagcggaggaaggaatctcagccagcttgcgtaatactaataaaattccattaatgatagtagttttacctgtacctggtccacctgtcaaaatagaaatcggttggttaactgcgtttttgatggccaacttctgtgtatcgtcgtagtgaatcttaagttccttttcagcatccttgattgcttgctctacctttttatcatcatattgttctctttttttatcttcttttttttctaccaagtttttcatcaagcgagcaatatcaacttctgtttgataaatattttgtagagcagcattctcaccatcaactattactttgccagcttcttgtaaactattaatacagctagcaattgggtcgaattgattgatttgaagcaatttacttgcttctgttaataactcagctaagcctacataagtatctccctcaccatttaaagcatcgagtaatacttgataaacagcacctttaattctacgtggatcatcactagcaatatctaattggcttcccatcatatccgcggttttaaatgcaaaacccgaaatatcattaactgctgcataaggatctttctctagttttgctaatgcttcaccatgataaagctggtaaacccgtcctgcaatacgcttattaatgccgtatttagccaattttaaaattacttctgaataagaatccatcgcatttagtcctgccaaaagactatccttttgctttctagttaaagaaagcttatcaatcttagctggactttccttcaatacatctaaggcatttagccctaattcatcaataatcgtagtcgcagcctttttaccaattccagggaacttattcgaactcaaatacttagttaaagatccctcttcatgtggcaatacttgcttatagttatttgctctaaactgcaagccaaatttttcatgcattactagtttaccctcgaagcgatagctactattaatttgaatatcgccaaaattccctgtcaccttaatatcgggacgagaataatcggataaagtgccgataatttcaacgtcaagaattttatacaagtctttactattttcaaaaacaatcccgttaaccttaccggtaaattcattcataatttttcttttccttgtcatttagcatcttcataattgaagcatactgattcattgcttgttgataatacttagcatccatctgcttagcttgagcaaaatatttttgagcctggtcacgatctttttctaatgtagtgacacctagtaaaaaataaactttcgcatttttcttattatcaggaattgccaaatacatttgctgagcctgttgattctcacccaaacttaaccaaatatcgcctagcaattcctgaattcgctcatcaatttttttgatcgtcaaagcataagctaaagctttttggccttgccctaattttaagtaagttagtgccttttgataaagagttaagtcatcattaggtatctgatctaataaagccagtgctttatcaaaatcgccttgcatgtaataacacactgccagattataatttaattcttgtggctctttaaccagatgctgggcctgctccaatagcttctgtgcttgatccaagcttccttgctcaattaaatacgtcgatagctgcaaataattagcaacttgttgtggatgctgatcgatttttttgattaaaagatgaatggcttgttctactttaccttcatcataaagttgcgctattttttgatccattataacgagtccgtcttcgataatttacgtcctaaataactagtttcattccacactaccggtttaaaagtctttccgccatctagtgtttctaagacagttaaagaggtattgctaaggccgccatttttgcgaatatctttcaatggatagcctaaaagtccacccataatagctgataatgccgcaccatgactaactgctagaatcttatcatcatcgtcaggaaatctttgtgccatttcttgagcaaatgcttttccacgagcaataacatgtggataatcctcaccatgaagttcagtcggatcatatttatctggatggtgccaaaaattatccatttgtttagggaattttttctctgcatccccaaacttcattccctccatatcgcccaaattaaactctctgagtcgttcatcgatcacaacaggtaagttagcgttcattgcatcatcgatgccctgagcggtattaaaggcccgatcaagcggactggcaaaaattcctctaaatttagttccttgcaagtgatgacctaatttttttatatcttctaagctttgtggcaaaagtggtgaatctccatgtcctccttggaagcgactagctaaattccactcagttttgccatgacgaacaaaataaatttgcattgcttaaatccccctaattgtctaatcaataagaatagtttagcacaaagaaaaaggcgttcgaaaaatcgaacgctctttttgcatattttttaaactaattgtaattgcttttcttcttggtaagcagcatcaatattaccgccacctaaacattcttcacccttgtataaaacaagtgcttgacctggtgtaactgcacgagctggctcatcaaagtaaacatcagcagtattgtctgcggcatgatacttaacagtcacgccgatatcacattgacgataacggaactttgcagtacagtgcatctcaaaatcatgatctggcttaccagtaaagaatgacatatcacttgcattcaagcgactagcatatagaagtggactatcatagccctgctctacaattaattcattcttcttaagatccttgccgaccacgaaccatggatcagttgattccttagttgagcccaagcccaagccctgtctttgaccaatggtgtagtacattaaaccagcatgctcaccaactaccttaccatcaggagtgaccatcttacctgatttagctggtaagaattcacttaaaaactttctaaagtttctctcaccaataaagcagatacctgtagaatcttttttcttcgcggtagctaaaccattagccaaagcaatctctctaacttgtggcttagttaggttagctagagggaaaataaccttactaatctgctcttgactcaattggctcaaaaagtacgtctggtccttgttaccatccttaggacgcatcatatgagtaacaccattggtatccttaacagtcttagcatagtgccccattgcaatgtagtcagcatccaagtccatcgcaaactccaagaacgacttgaacttaatctgactattgcacattacatcaggattaggggttcttcccttcttgtattcatccaagaaatattcaaaaacgcggtgccaatactctttttcaaaattaattgaataatatggaataccaatcttatcggcaaccttttttacatcttcatagtcttcagtagctgtacagacgcctgaatcatcggtatcatcccaattcttcataaagacaccaacaacatcgtagccttgttgtttaagtaaaagtgctgaaacagacgagtcaacgccaccactcatacctacaactactctagtcttgctattgtcaaccattattcaatcaatcctttacttcaagcaaaatcttacgctcctcaagatcctttaaaatataatctaaaagttctacagtaggagctaattgcttatttttaaaaatattaaccttctgcaaaccgttgcgatcagtaataaccatagttaaatgcgacaagtccttattaatggtcatctttaacttagtaggcgcgttataaggtgaatcattgtaaagaggatgttcataattaaaattacccttagctgtcttcacaaagccagcatcaatcaaagcataaagcttcaactcaagattcaaagtaaacttacgtttatcaccattaatcacaactgtatttgccataattttcctcacttatttataataagatactttctttttgaaagcaactatttatttttagattgaattctttgtacaatttttactaattcttgagcgaattgctcaatttcttcatccgtattataacgcccaaatgaaattcggatcgactcatttattcttggtgaattttctccaaaacaagcaattaaaacatgtgatggctccaaagaaccagcagtacatgctgaaccgcctgacacggcaaatccattcaaatcaagatttgtttgtaaagaagtagtagatacaccattgagatgcagattaagcacatgatgtgagtaacccggaccatacccaccattaatttcataattaatttgatgatcgtctaattcctttaaaataatgtcttgataatgagcatatttcttttgcaaagcatcacgaccaatctcggatacttcacggacagcttcgccaaagccggcaattcctggtacgttctctgttccagctcgacgtttggtttcctgctcaccgcctaaaatcaaatttggaatatcgatatccgcattttcatataaaaagcctaaaaacttaggtccattaattttatgtgcagaaacagacagaaaatcaatgttcatgtccttaacatcaattttaattgtgcccattccctgaacattgtcaacatgaaaatatgcattggagtcctttaccattgccccgatttctttgagcggcataatggtaccaacttcattgttaacggccataatcgatactaaaatagtgtctggcgttaattccttttttaactgttctaaagaaatttgcccgttttcatcgacattcaaatagacaatgttgtagccctcattttccaaacgtttcattggattaagaaccgagggatgttcgatcggcgtagtaataatctttttaccaatatttttacgagcataggcagttccaagaatcgctgtattattgctttctgaaccacctgaagtaaaaataatctctccatcttgagcattaatatcttgagcaatctggtgacgagctcgatcaattacatttctggccctacgacctaattcataggtactagaggcattaccaaaatcatttttcatttcatcggtaataatatcaattaccttgggtgacattggtgtcgttgccgcattatctaaataaatttcacgcacgtttaattcatcttttctacataatcactaattaacttagctgccttagcgccgacttccttgacaaacttgtcaaaatcattgtctgcattagcatccccattatcggaaattgcacgcatagcaaccaacggagttttaaaatgacgagcaacttgtgcaaaagcggctccttccatttctactcctaaagcttctggaaagtttttcttgattaactctttttgttcttctgattgaacaaaagtatctccagtaacaacaagcccttccttaaaatctacgtcttcttcacctaaatatttcttaaatgcttccctttcaggcgaattcaacttaaaggtagcaggctctcttggaatctgaccttctacatattcaccggcactaacacagtgagcatcgtgataggcaaaatcatttactaaaatcacatctttacgatgaacatcatcttgtaatgatccagcagaaccagtcataaaaattacatcaattttttctttagttagtaaactagtcagattcatagcggcattcactttaccgataccacttaaacctaaatatacatcattgccattaacagaaaaatgttcgaattctgttgatccgaacatttcttttgtttctgcatggaaatgatcacgataaaattcagcttcttccgccattgggacgataatcgcaatcttcaatttatttcctcatttccactataaatgaaatagtgctaatagcaccaatataattaaaacaatcactatcaggatagcacgattcaatctttttttcagtcttaaagacttctcttggcgaatcgtttccttatcactcgattgattatgctgataaaattcttgtccatccccagccagagggcgtcttctaggttcttcttcagagtcatcccgcttaaagtcaggatttacatctacttcttctgaatcattatcagaaaaggaagattttagcttattaagtaggctttttttctgccttttacgataatcagagcgtttttctaccataactaatccttattatcggtctgagcattacgcaacatcatattctcccaaacagtaattgcataaattgtctttgcatcaacaatttttccttcagccaataaagtttttaattcatctaagctataccaactagaagttaaaaattcatctgcatccagtgcccgcttatcagtcaatttagttaaggtatcacaatagaaaagatacatcttttcatcacaaaaaccaggagaagaatagaattcactgaccttttcccagtaatctgtgcgatagccaccttcttcattcagctcacgcttcattgcatcaagcggacttgcatcagtggaatcaaccaaaccagctggaatttccaaagtaatctgcttaattggttcccgccattgctttactaacaacatcttttgttcatcattaattgcaataacagccgatgcaggcttatgcttaataacttctctagttgcaatttcaccattaggaagcttaattgtacgaacagccagatccaaaatacgtccttgaaaaatctgctgtgacgagatttctgtttcctttaaatccaaaatcccagctcctttttaggctaaataaacatttacacattgcagaccatttttaccttgagctaactgatatttaactctttgacctacttgcaaagttttatagccttcctctttaattgctttatagaagacaaaatatgacttatgattacgatcatcttcaataaagccatagctactgccttcatcaaattgttttacagtacctaaccgcattagttttcaaatccttcttgaacagcttctgggtaatctgcttcaacgattttagcacaacgaccacaaagcattggcaactttggatctacgccaatatcagttctaatcatccgacaacgaggacatacttcgccttcagcatgttcaactactacactagcattattcaattgctttgcattatcaggtgcttcaccatcagcaatagttaacttagatacaattagaatttgtctgaaatcagcatccaagtcttggagcattgccttagtttccttatctgggtaaatagttactgttgcttcaaacgatttaccaattaacttcttatttcttgcatcttctagagccttcaagacgtcatcacgcaacttcatgaatttaccccaattttcaagcaaatcatcatggttagcatattcttcaacttctggcatattagcaagttgaacgtaatcttcaggttctttcaagaagccccagatttcttccatagtgtgtggcaaaattggtgttaagatcttagccaatttaacagcagcgtcgtaaataacagtttgcattgagcgacgatcatggctgttttcaccatcaatgtaaagtacatccttagcaaaatcaagataaaatgcagaaagatcattagaaacaaagttgaagaccttcttgaagacagtagtaaaatcaaacttgtcgtaagcagcaagacagtctttaactaagtcatttaatttcacttccatgtattgatcaactgaacgaagatcagcataagcaacgcgattttcttttggatcaaaatcactagtgttggccaacatgtaacggaaggtatttctgatcttacggtaactttctgcagactgctgcaaaattcccattgagactgcaacatcagaagtagtatcagcttgagctacccaaagacgaataatttcagcacccatcttcttaattacatcgtttggtgaaattacattgccaagtgacttagacatcttgtgtcccttatcatcaagcacaaagccttgtgataatacttctttataaggtgccttaccagttactgcaacagacgtaatcaaactcgaattgaaccaaccacggtattggtcactaccttcaagataaagatcagctggatagtgtaaaccatcacgtttttccattacgcctgaccaagatgaaccagagtcgaaccaaacatcaagaatatctttttctttagtaaactcgccatttggtgaatgttctgaagtaaagccttctggcaacagttccttagctgtatgagtgtaccaagcatttgaaccttctttttcaaagatcttggcaatatggtcaatcgtttctggagtaacaattggggtaccgtcttctgcatagaagatcggcaatggtacaccccaagcacgctgacgagaaattacccagtcgccacgatctttaatcatgttgtaaagacgagtcttcccccatgaaggaataaagttagcttgttcaatttgatccagaatttgatctctaaacttagaaattgaagcaaaccattgagtagttgctctgaagacaacgggcttcttagtacgccaatcatgtgggtatgagtgagtaaagaagcttaacttgagcaaagcgccagcctttttaagcttatctgctaccaccttgttagcatcatcatagaacattcctacaagatctggatctggaatatctttagtaaagcgaccttgtgcgtccattggactgaagaccgggataccatacttttgaccaacacggtagtcatcttcaccaaaaccagtagcgttgtgaactaagccggtaccgtcatcatcagtaacataggtgtcattcattaccaaaccatattggcctacaccagtcttaccataaaggggatgcttataagtcatcccatcaaaatcagtaccttttaattgtttaagtactttgtagtccttccagcctaagtcttctgcaatggctggcaaacgatctgaaccaattacatacttcttaccgtcaacttctactaaggagtagtcaaatcttggattaacggtaatacccacgttacttggaatagtccaaggagtagtagtccaaattactaatgaaacatctgaatctaagatacctttaccatctttaattggaaaagcaacataaattctaggtgatttaatatcatggtattctacttcagcttcagctaaagtggattcacttgaccatgaccagtaaactggcttcaagcccttataaatataaccttttttatacatttctccaaagacgcgaatttcttgtgcttcaaagtcatgttgcaaggtaatatatggattatcccaatctgccataacgcctagacgcttaaagtcggccatttgcttttgaacttgttcttcagcatattgtcgacaaagctcgcgatacttagcacgatccattgtcttacggtcaacgccttgcttagctaattgttgttcaactggaagaccatgagtatcccaacctggtacatatggtgcataataaccgttcatattcttgtagcgaacaatgatgtctttagaaatcttgttcaacgcatgtcccatatgaatattaccattagcaaatggagggccatcatgtaaatcaaaacgaggcttaccttcgtttaactttaatctttgttcatataacttgttatcttcccattctttttgccattcagcttcacgaacaggtagattaccgcgcatcttaaatttagttttacctaaattaagggtatctttgattctcattaacaaaattcctttctaaaaaagaaagcctcatcctaaaattaggacgaggctaaccgtggtaccacctaaattgaacttattataagttccacttaactttgcgtaacgtgcaaataccgtttagattaattaggcagctgatcagctcttaggctcttatgctagtcttccaccatcactagctcgctgaattgccttcaagctttactgtcaatctaatatgcttattttttatagtcgtcaggaaaaacaattgttgggcctaaaggatctgatttcatttcaggcttaacattaattgtttcatgacttggactgtccccggtcattggtttaggtgcagcattttcttcattatctgcatcgtcagaatcatccggttgatccaactccaaatcatcagggccttgagaagagtttacgtcattttcatcatcattgtcaacatcttcatcttcaacgtcttcatcatcagcacttactggctccgaaccatcatctggataataacgctctaagttgaagtaatcatccaatgcatgttgccacttttcatcattcaaattatcgatttcagtctgtagcatttcttgaatattactacgaaattcactaacttgctcttttacacgcatataatccgtagaaatagtatcttgttgatgcttttggaagttaatattatcttccgcttgctttttggcatccgcaataatctgcttagcctctgcttctgctttctctctaatttcatcagcagtttgttgtgccgaaattaatgatttatttaaagaacgctttttttcgttatattcattaacttgatcttgataatcatctactttttcttgtaaatcagttaactttttatttaaagaaactacttcattcttcaagtcaaccacttgatcaagtgtatcaccataatcatcaacaatctgatctaagaagctatctacttcaagacgatcatatccattacgaccacgccgtttaaattccttgttgtgaatatccatcggggtcaattgtgtttctttgtctgccaaagtctgagcaccaccttatatttaccttttcttgtagtcgaaacatcctcaatcaaaatccgaccaaagtgtcttaaactcaagacatcgtcttctttaatcattatattagaatctgctatttcatgccaatttaatttaaccagctgactattaatcatcttttgaatttgaccgcggctttgtctgctaatacccgataatacagcatcaattcgcattgaggcaactattttcgttttttcaatcgaatcatcctcaggaaccaaaacttctttgaagctaatcggtctcagctttacttttgctctgccaatgcggtcaatttgctcttcaaaaaattccgtcatttcttttttagtgaaaaactgccattttccttgattatcattaataatatcgccaaaaatacttgtatcaatacccgaattcgccaaggtgcctaaaataacactataatttattttagtaaatttttgcggatattcaatttcatacggctgaatctgataatcactcggtcgcagattaagccattcttcacttaaataaactcgctttttctctgcattaggatagccaccatactcttgaacaaatgcatcattaccaacaattgttcttaaaattgctcgttttcccggatccaaaaaatcagtcaaaattggctcatgcttaaaaatcagctgattaaaaagaccagtaaaatagtcaattactggtctttcctcttgattaaaatgtgggtaaaacttacttgcctgtctgcgttccattacaccatcatcctcaataaaatatcaaatatccatcttaaaacatagttttgaatgaaatataagataaataaagcaataattggcgagacatcaattccagttgaataagctaatctcgcaaatggaccttttcgaaacaaatttaaatatggatttacaaccttgtctaaaaagcgaccaacaacagaattacttagcattggtagccaactcataattgcatcaatcacgatcagcagactataaagccataaaatccacgtcagtgccaagtagattaaatttaatatattaaccattagcttaaattgtctttcttatccactaaatcactaattttgccatcagtaacaaactttggtggagttgctaaaaagattttatcaccaatacgttggatttcaccatttaatgcatatacagtacccgtgatgaaatcaacaatccgacgtgctgaactgtcttccattctgctaaaattaatcactactgctttattatttaataaattttgtgcaacatccttagcatcggaatatacccgtggttcatataaaacaatcttgcttttagccgaattcaagcctgatttaattgaaaccacattatcgcgattaactgagttcagaggcaagtcttcattttcatttttagtctgtgaggcatattcttcgtcattttctaattcatcatcattagaaattccgaaaaatcttcctaatttatcaaaagccatttatactacctccaaaactagttttcactacgatgtttaaaaaatggaatatcactgttatcatcactatcgtcctgagcgctagtttcaatttgagaaatactatcctggtcttcatcactaaaagtatcaaaaccctcataatctttcttaggctcagtaggttgggtatttcttctttgattgtcttcgctatcatttagtccccaaacactggttggatcaaccatcgtttgcttaggctgctcaggttcttgtttttcggcagcaggctgaactgtttgtggtcgatcaactggttgcttaggttcttcagccttaggagcttcttctttttctttaactggttgagccttaatttgttggctacgacctggtaattgcttagaagcagcttcttcagccttagaatcaattccagtagcgattacagttactaccacctcatcgcccaagttaggattaattgaagtaccgaaaataatgtttacatcgtcaccagcagccttagaaacaatctctgaagcatcttgagcctcaaataatgtaaggtcaggtccaccagtaatgttaagtaacacttgcttagcaccatcaatagaaacttctaataatggtgaagaaatcgccagcttagtagcttcaactgttctattttcaccgctagcacggccaattcccattaaagctgcaccttgattttccattacagtcttcacatcagcaaagtccaagtttacgtagtcagttgaagtaatcaaatcagaaataccttgaacaccttgcttcaagacattatcagcttccttgaaggcatccatcataggagtcttcttgtcaaccatttcaagcaaacgattgttagctataataaccaaagtatcaacatattgctttagctgagtaataccttctgcagcgtttttagagcgcttagggccttcaaaactgaatggacgtgtaactacgcctacagttaatgcgcccgtctcacgcgcaatttttgccactacaggagccgcaccagtaccggtaccgccacccataccagcagtaataaagatcatatctgcacccttaagtgcatcttcaatcgtttgttcactctcttctgcagctttttgtcctacttcaggatgtgaaccagcacccaacccacgggtcaacttaggccctagttgaatcttgttttcagctttgttgctgttcaaagcctgaacatcagtgtttgctgcaataaaagaaacaccttgtacgccatcgtcaatcattcggttaacagcattgccgccggcaccaccaacaccaattactttgatgacagcattcttattgtcgtctgaatcgaatgtaaaatccattaaattaaccacctttaatcaaagaatttcttaaagaaactcttcaagctattagttttttcttgcttagtattattttcatcgtctggcacagattctgttctggcagacattttgcttctattataagcttctttagcttcactttcactattagaagtcgtacttttagaaatcttggtactttttggctgagaaacggggtcttccacagcgggttcaccaaaaccatagattacgccattaacaagatagtcaacttcagacatcttatatgaatagtggacgataccataagcagctgtataaatcggattacgcataccaatttgatctggttcataaattcgggccttaacatttaacccattagcagtcagactatcaattccttgtaataggctactaccacctgtaatcacaataccacctggttgcttcaatgcattatgcttaactaaaccttttcctaaacgagtcaaaatttgttctaagcgtgcattaataatttcactaagatatacttcgtcaaccatttgctgactatttgcaccaacactattaatagcaaatttatcgttttttgaggcaaattgtggatccgcaaatccatagtccaacttaatttgttcagcatcctttttcgaaatacttaaaacagcagagatatcattagtaatatcgcttccgccttctaaatcgatgttggcatacttaatttggccatctttaataacagttgccgtacttacgccaccaccaagatcgataattaccgaaccaaaagttttttcactttcattcaatgctacacttgaaattgctaaaggcgttggcacaaagaaattattatgataaccggctctttcaatagccttcttgatattgtgcaaaggactagtaggtgcagttaataaaattccactaacacccaaggaacgtgcaatcatttttcttggatcatcaacttcagttttaccatcaatcaaaaagcgactcggcaaaaatgtaattgcttcacgatcatccttagctgctgaatgaatcgcagatctaatcgttctttttacatcatcattatttacttcttgcccttgttcaccaacattagcaaaaccagttgcagtttccagttgtaacatccctaccggaattcctgtaactacactataaatcttggcgtttgttttttctgctacaccttttaatgcacgactaattgcactagcagtttgatcaatatctactatttgaccgtgtcgcattcctgaatttggcgttgtaactgcaccgataaccttaccagaatctgcaacaacggcttttacacttgtggttcctatatctaaacccactaaaagatttgaattctccaaaattaagcccccattaatatttgccttgaaaaaattctaacataaataaacttgcaaaacagctacgatatgccataagctttcttttcactagaagttaatggtctactaaatgcacctatttctaaatcaataaggctatgtttaccagctttaattctaatagtatcataatattttagtttgctattcaaagtagcagtattgccaatcactacattaccgtccttcattactaaaataatttgtgaatttcgtctggtattcccacttaataattttacctgatttttaaatgaattaggtaaactgttaaataactttaaatcattttttaactcatctgatttattatagccaacaaaaataggtttatcttggttcacttttgtccaaggtagagctctcgtacctatttttccattatccaaaatctttcggtaagaataaccatcttttaagtaacccacggttttacgttcattaatttgtaaaatcaattgattaatatgacctaaatgaacttgtgcactttgaatttctggatatttttgggataatctttgactcaaatctttttgttgaaacaagtaatcaaaaactttatcgctagccttgatcttggataccttaacaatttctttagcaggtaaatgctctgcaccaattattttaacagtactgatattcgctaaaggtgaaatatagtatcctaaaccagctatcgccaaaactgaaaccgtcattatcagacctagcctacgtcgtaatgatcgtcgtctttctgcctgtaaatttgagagtgaggcagaaatcttggtctgcgattttcgactattcctttgttggttaaattcatgattcaagtacggagacaattctttccttggatcaatcttagttactggctttttggccatctgcctcacctacctcctagcgtgaaatttcttccatcaccttaatcacttgatcagatgcatcaggtacgcctaaagccttagaagctttgctcatttcagtagcatacttttcatcgagcaaaatatggtcaattgaagagacaaaattatttggatttaaatcatcttctggaataaccaatgctgcaccagctttttctaaatcaagcgcattcttcatttgatgattatgagttacattagggcttggaatcaaaataacgggtacacctaatgcagtaaattctgcaatacttgttgcaccagatcttgaaacaacacaagtcatttctggcaatagacctggcatgtttttaatgtatggcaaaactttaatattattaccaatatcaacattcttaattttttcttgtaccttatcaaaataaaaagtacctgttgcccaaataatttgatatggtttttgctttagcgtcattaatgacttaagcataattctgttaattgctaatgctccacgggatccaccaaatactaaaacagttggcatttttggatttaatccccatgttttttcaagatcaattttttcttcgtgcaagcttaaaacttgttgtgaccgtggattacctgtcttaactagtttcttcttttctgagaattcctttgcagcatcatcaaatgtataacaaattttatccacataatgacccaaaaatttattagctaatccaaccactgaattagattcatgaatcattgttggaatatgcattttagctgcttcataaaccatagcaccgctaacgtaaccacctgtacctaaaatgacatctggtttaaagtcccgtaaaatttggcgtgcgcttttagtagcttgtaaaaatagcttgatagtctcaaagttttttaacggatgtttacggttaaagccttgaatcttaattgttttaaagttaacaccggctgctggaacaatttttgattccaatcctttttgtgtacctacaaataagatttcatcgtttttactaataccgcgttctttcaaacgttcaataattgccataattgggtaaatgtgaccgcctgtaccgccacctgtaaaaataactctcattttatttagtctttaattcctcaacaaatctaacaaagtaatcgccacgttcttcaaatgttctaaattgatcccaagaagcacatgctggtgagaacaatagtacatcgcctggttcaactaattcccaagcacgaggaacggcctcttgtagtgtattaacaattacaatgtccttaattcctgcttttctagctgcgtcagctaacaaatatctagtttcaccataaagaacaattgacttaacatgttttttaaataatggtaccaaatcatcaaaagtgaagccacggtctaacccaccagcaatcaatacttccggttgcttaaatgatggaatagctacagttgctgcttcaatattagttgacttagaatcattataaaccttgcagccatcaagtgttgttacatattgcaaacgatgcttagcgccagtaaaggtgctcaatactgcggcgatatcatcattatcagcgcccataattttagaaattgcaatagcgactaaactattttgcaaattatgaatacctggtaatttaatatcagaaatcttcataatcttttcgttttgactttcaagatattcatcgccaatgaaataatcagcattatgatctgtctcagaaaaagtttgcattttagctggtgaaacttctttttccttagccaaaatatctttttgatcataattagcaataaagtaatcattactgttttgcgttctagttacattcaactttgcattgacataattttcaaaagtcttgtgataatctaagtggacgttgttgtaaatatcaacgatcgctgcaactttaggatcaatatcagttacacccaaaagctggaaactagaaatttcaactactaaaatatcatccttagttgccttaggtacaacttcagaaatcggtacgccaatattaccaactgcataagcatgatgaccagatttttgcaaatgatggtccaaaattctttgtgtcagcattaccgtagtagtttttccatttgaaccagtcacacaaacatagggagcatcactacaacttaaggcaacttctggttcagtaataatcgggatattcaactcctcagctttttgaaccatcggattttcatagggaatacctggatttttaactaaataatcaaaatgttctttttcaagcaaatcaactggatgatgaccgccaattacgcgcacgccgcgacttttcaattcttgtgccttagcatttttctccaaatcagctttatcatttaaagttaaatttgctcctaattgcaaaaggagttcgctaacagcaaaaccacttttacccaagcctagaaccaaaatgtttttattattataagttttaatatccttcattttatgattatccccaaattactaaatacaaaatactgccaattaatccaactaaccagaagacaatatctactttccattctgaccaacccaacatttcaaagtggtgatggataggtgtcatcttaaaaatacgcttacccgtagtttggaaagaaattacttgtaaaattacactagcagtttcacaaacaaaaacaatcccaactaacaataatgaccagggacggttaagcataatactgattgttgctaaaccgccacctaaagcaagtgagccagcatcacccatgaaaattttagccggcttatggttaaaaataaagaaggcaattaaaccaccaattacactcatacaaaaggccaaaacagcaaaattcttttgtttgaatgcgatataggcatatgtaccatatgctacaactgataaacctgttgctaaaccatcaagaccatcggacaagttaacagcatttgaaaaaccaaccagccaaaaaataataaatgccacaaataaaactaagctatggacaaccccagcaaaaggaatatataacccaaattgaaaatgatcacttgtagcaatcaagacaattaaaattgcaattataatctgtaatgctaatttttgccatgcacgcaagcctaaattacgtttgaagtaaagcttaataccatcatcaaggaaaccgataataccgtagcctaagagactgattaccaaaatccaaacaactttattcaagctgtgctgcatagcagctacccaaataacagaaataactgctgcaattacaaaaacggtcccacccattgtaggtgtgccagactttttttgatgccatttaggaccttcatcacgaatttcttgtccttcgtgatgtgaccgcataaatttaatcaacaatggaataaagatcactgtcaaaaccagtgaactaactagggcaatacaacttgccaacatcatattcattctgagttactcctttaacttaatgtttaattttcttccagcttttaattctgttcctttagccacgctttgactcgcaacagtgccggtaccttttatgcttaacttaatatctgtcaaactagcaaattggtgtaaatcactataagtccatcccgtcatatcaggacaaatgatttttcctgaagtattgacaaaaatcttagacccagactctaacttttcgccactcttaactccttgattgctaatccgatcaccgctaccaattttaaccaaattaagtcctaattgcttagtttgactttcagcttgtgcaacggttttagcttttaagtttggtacttttacagtagttgatacatcatcatttttagcaatcgaaatgattctctgcatcatcggtttgaaaattgaagccaaaatcttttcagctccgcctccaattaagtgtggttgcttaattgtcaaataaatacagtaacgtggtttacttgctggataaataccaacaacagagaaaatataattactatcaccctttagataacctccacctttagggttagcaatctgcgcagtccccgtcttaacagcaatatcggcgtttcccatcttataagcagaaccagttcctgattgcttattaagtacctttctcatgttagccacaattacttttctggttttagcactatatactggagtaccaacttttttaatctgatagccttgaattgtattgccatcagagtcagtaattttattaaccaactgtggctttaccatttgaccattattagccaaagaactataagcttgcatcatttgcattacattcacagtaacgccttgaccaaaagcagtaattgcttggtcaactggtgttttaaacgaaatcatccccggctgctcacctggaagactgactcccgtcttttcaccaattctgaacttcctcaagtacttcttccaagtcttagcacccatcttttgttctaacttaacaaaaccagtgttacttgaacgttcaaaagcttgagaaaatggaattgtgccccaacctgaagtcagccagtcatggatagtcgaaccagcaatattaacagaaccagaccggtaatactcattagggttgtaattgccactgttgactactgcagcgaatgacaaaatcttgaaaactgatcctggttcataagtatcttggaccaagatatcccgatacgacttagttaatcccttcatagtttgaggattaaaagtagggcgttgagaagttgccaaaattttcccagtcttcatgtcttcaactgtagcagtaattgatgttggtcggtaagttttctgtacttcacttaagcgagtctcaagcaaactctgcaactgagaatctagtgttaaatacaagttgtttccatttttagcaggcttataaacctgattactatttggaagctgatattcagatgcatctaccgaagaaatccggtaaccatctgtcccagtcaaagtcttattgaaataggcttcaattcccatagttccgactaagttttgtgcattagtctttttattccaaattggttgagccaatccaacagtatgtgatgcaaaaacaccattgggatacaatctagatggtgtttccaagaacttaattcctggtaatttcattgcttcaatctttttcttttgccgcaatgtcagtccactaccacctgtcccaaattgtacctgaaagaccttctttttgggggttaaatattggtaaattttttccgcagacaatggtaaaacctgtgccagcttttcagctgtcttggttttattcactacatactcaggtttattcttatagttgatcgaagtcttatctaaaatcgcataaaccgtatacaaatgcgaatcttccgcaattgttaatccatttcgatcatagatagtccctcgcgtggccttaattacctgattgcgcttataaagctgcttggtacgctgtgataaattttgaccattaactgtcttggatattccgatatataaaaatctagccgtaaatacaagaaaaaccaaagccacggccatttggagaaatctccccaccgtaaagcggtagccgtgggctttggatttttgtaattttaaattactgttttttttcattaacgaatcgtcctaatatttttgttaattagagttaatcctttttcacgtgcaattttatttaaacgtgaagtagaggtcaactccccaatctcttgacgtaaatcggtaatcttattctgttccttagcaactgtttgttgagttctagtcaattcatgttgagccgaagttgcagaaatactagaagaaactagaaagatcatcatgcccaacgtaatgacgcttccaataatcatcaaagctttttctatgccactataaggaactttacgcggatcaaggataattcgttgtcgtctttgcgaaccatttctactacttggttcatattcaatttttcttgctgagctatcagccataacattttcctctttataacttctctgcaacccgtagttttgcactgtgtgagcggttgttgttctctaactcagaagtagaggctacaattggtttgtgatttaccaaacgtagcgttggcttcataccgtccggtataaatggcattcctcttggcacctcaacttctgaatacttcttaaaaatccttttaacgatcttgtcttcatgagactgaaacgtaattacactgattcgaccacctggacgcaatatcttaattgcttcctctagcgaagcttgtaaaacatcaagttcgtgattaacagcgacccgcaaagcttgaaaactcttctttgccgggtgccctccagtccttcgtgcatacgcaggaatcgcatctttaatcacatcaactaattcaaaagttgttgcaattggcttttcccgtcgtctttctacgattctgtgagcaatttgacgagaaaacttttcatcgccatattgatacaaaatatctgccagttctttttgacttaaagtattaactaactgataagcatctaagtcctgactttgatccatcctcatatctaatcgcgcatcataacgatatgaaaaaccgcgatctgcttgatcaaattgaggggaagatacacctaggtcatagtaaatgccatctattccatctgagtaacccagttttaccaggtccttttccagattactaaagttgtcatgtaccaattctaaccttggctcactatccagttgtaataaattcgcaaagttcaacttcgccgattttatcgcatattcatcttggtcaaaacctacaagcgtaccggtgtcaattttgctgagcaaatatttagcatgtccaccaccgccaaaagttgcatctacataaagaccaccgttttttggtttcaaattgtcgatagtttcgtgtaagagtacactggtgtgtttgaatttcatattttttatagttcaatgtcgtccaaattttcagcaatatcatcatagtcttcgttagcttcttcttcaaaactagtccaacgttcttttgaccaaatttcaattcgatcagagacaccaatgatgacacattctttaatgagtttggcatgcattttcaacgttgttgtcagattaacgcgaccttgcttatcaaactcacattccatcgcaccagagtagaataaacgcataaatttacgtgtattcctcttagtcaacggaagttttgctaatttagcttcaatcttcgaccactcctccatcgagtagccaaaaatgcagccttccattcctcgcgtgaatatcatcttgtcgccaatctgatcgcgaagtttcgctggtataatcaggcgacccttgctatcaagattgtggtgatattcacccatgaacatggtctagcccccttccactaaataatttaccacaattccccactctctaccacattcataagaaaaaaatacagatttttaaatttcttttttattgtgatttttcaaaataaaaaaaagtcacaaaatattgaaattttgcgacttaagcatatacaagtaattttattttataacactagcatcaataaaagtccgatataccagaaaacagtacaggcagtcaaataatcccataattttctaactgtttttcctaaagaaatatttttatttctaatcgcatcgttcagcgacacaacaatcactaatacaaaatagcataaaaaaccataaggtaaaaaagaaggtttattcatatgtaaagtaattaatccacaagctgaaagaaagaaaaatggcataacatcgtaccctctaaactgtgctttagggaaaattttattgataaaaaaagcaactactaagccaataattggaattaggaaaatataaagcataagtattcctccattctttttattctaaactataattgatttgaaaaaaaccgttaataagcataaaatattgttcaaataggagggctgtttatggcacgaaaaaagaaaaagaaatcaggttttcaaaaattaactattgcaatggcttggatcatggcaattattactttagcagctgttattgctcaagctgctatctcacttcaaagtttttaaggattaaaaagacgcgaaagaaaaaatcttccgcgtcttttttaaactcgataagcgtttaaatcaattaagaatggataatcctgagctaaattgccccaaatccaatacaagagaaaaaagaagacaactgcccaacctaaactgactaaaatgctcattaataatacgtgtgctgatgcagcactaatacccaccatattaaaaatgagccaactatacgcaacaaaaactgcagttcctaataaaacgacaattaatctagcccataacatttccggtaaaaaacgagctgttttttgacagatccagcaacttgcaggtaggaaaactgtataaacaccgataatgccataaaaatagatatcagcaacaattcctgcacctaatgctaaccaaatttcattatcattagtatcatcaaacagaccaatcaacattacactgattggcaaaatgacgcttgacgctgcaaagttgtcataagtcataaactgatgtaagtaaagtgcacatacaccgtctactaccaatgcaataaataagccaattgccaaaacccattttcgaaacgtagacattaattagccacctgtctttcaattacagttacaacagatggatcactaatatcacctgctggtttaattctaatctgatcagatagaccaaatgaatcacgagttgtcgtagtaactgtaccaattaacaagccttttggtgagttaccgcccataccactagtatatactctcgtgccggccttcagtttgcgaccatcaaccacctgtgtaaaggcaagataattattggaagtaactgtaataataccatgtactgtttttccattcgcagcatccgcttgaacagagaagcgattagccgactcatcagtagtagtaagtaattcaaccttggaagaagcagcatttgcttctacaattcgaccaataacaccgccatcgcacatgacagccatattctttttaattccagctgaacttcctttattaatcactaataaatctgaccatgtatcaggcgaccgagaaataacagaggcgttgaccatggtatagccacttaacgtatcttttaatttcaatgcagacttcaattgcctattttctttttcaagagctgaattgcgagccttcgtctggcctaaattagtaacttctcgctttagatgattgttttcttcttgcgtatttaaaatatcatgaacactatttaatccgcctgacacgagccctactggtacatcaacaattctagtacctaaagcaacgacatcgttacccaagctttgaatcagtaaaggtgtattgcgcctattgcgcaagctaacactcccacccaaaacggataaaataacaactactataataaatgctgataataactttttattttgcagaaattttttcattaagaattgatcctatagaaaaaccggcaacagccggcttttttattatttgcgacttctacgcattacttcaatattcttgagtgattcaccagtaccaattgctacacaatcaagtggatcttgagcaataaacacaggaaccttagttgcttcagaaataacttctggcaaattcttcaagagtgcaccaccaccggttaaaacaataccatgatcaataacatcggcagcaatttctggtgaagtttgttccaaagtctccttaatagctacgataatgtcttgaactacatcttgaatagccttggcaacatcaactgcttcaatatcaacagattttggtaaaccagttactaaatcacgaccacgaatattcattgattcaatttctttagccttttcaactgaagctgaaccaatttgaattttaatgtcttctgcagttctttcaccgattaataagttaaagtttgagtgaacatagttaacaatcgcattattaaacttatcaccggcttgacgaattgaagttgatgaaacgattccacctaatgaaattgtagcaacatcagtagtaccaccaccgatatcaacaaccattgaaccagtagggtccataactggaagaccagcaccgattgcagctgcaaatggttcttcaattacaaatgcttcacgagcacctgcaactctagctgcatcaattacggcacgcttttcaacttcagtaacacctgaaggaacacataccattactgaaggcttggaattaccaacagtcttttccataaaatatttaagcattgctgcagtagtatcgtaatcagcgattacaccgtccttcattggacgaatagctacaatgctgcctggtgttctaccaatcatttcttttgcttctgaaccaacggcgattacttcgcctgtttgtgtattctttgctactactgaaggttctctaagaacaatgcccttaccttccatataaacaagtgtattggctgtacctaaatcgataccaatattctttgtacctaatccaaacacaaaaatctctccttaactgttgcggtctctaaatcttgactaattatagcatactataactttaaaggcgcctttcacacaaattttaaagaactttaaaacaatttttctcacgcaaacttaaatattgaccttctcccacgataaaatggtctaagaaatcaattttcatcatttttgcagcttgacgtaaactttcagttaattccaagtcacttgcagatggcgttaatttaccactaggatgattatgagcaataaaaattccagagcagccataaataactgcccaccgaaaaatttcccgcggatgagcaattgatctattcaaagtcccttgaaatagtttcttctcagcaataatgtggttgctattgtcaatatacaatgcccacaattcttcctgcttgtgtcctatcagcttatcagctaaatacgtacctacttcaatgctagatgtcaaaattgtctttctcttaggtgaagcgcagcgcaaacgatctagtactgcctcagccgtaatagcaagttcatccgagcattctgaactggtaataaactttaatagatcattaaacgaatttaaccctgtgtttttcagaaaaacatttaagtcctgcaacgtatgaattcctttattttctagttgttcaaataattgtgtcaatagctctaaatctgttttgacaaagtaatgatttggttttctttttaacataaaatccccctcattacttattacgcaaaaaagagctaaatttttttcagaaattcaaaaaagttttgacaaatcatcgttgcattctgcttatctttaacagatggtgctttcaaatctggtaccatcacacattttaaccctgcattagcagctgcttgaacaccggttgatgaatcttcaaaaactaaaatattttctttaggtaaattcattttcttagctgcttctagataaatatctggtgccggcttagccttaatgtgacctctttgtacatcaagataactaagatgaaaatcaaaataatttctgattccagtcacccacatagcatgctgaactacattttcataattacttgaagcaatcgccatcttcaagccacgcttttcaaattcgtctaatgcttcttgaacaccaggttgcagctttaactttccctcatcagtccattgccacaccaagtcatcagttcgcttaataaaacgatcacggtctgcttcagttttaaaatatttatgataaaaatcctgcatctctttaactgtagcaccagttaacttgagataagcatcccgcggcgtgcccaaattctcttcttctgccgcctgaatattagcatcccaatacagcttctctgaattaactagcaaaccgtccatatcaaagataatgccttgaatatcatcatctagcccttgtacgcgcatcacgttttcctttccaatttaaaatagcactaaccaaataaaaggatccactaacaattaaaatatcattagctcccaagtgatctcgcagctgggtaaaagcagctcgataatctttttcataattatatcttttttgtacatcaattggaaaatcatcttttttagctactcgcggataagataaagttgtcagtaaaacttcatctttatcatcaaacaagctaaacacctgctcaagatccttatctttcatcatagtcactaaagcataaagcttgccatgcttttgctgggtcatacgatgaacgactgccagcaaattactcattgcctgaatattatgtgctccatctaaaatgattagcggattttctcgtaaaatttgatagcgccctggaataatcgtttgattaatcgctgtttcaacttcttcatttgataaaggcagtttcaacaaaaagaacgcctggcaggcaacggcaatatcataggcttcaacttgtggtcgtaaagcaaaaactagctttcttttgtgatcttgataaacaatttgattatcaagcaaaacactaaagtctcgtcctaattgataaactatcgcatgttcttcttcggctttacttttcaaaattggccaaacaacttctggcacgttacctaaaactactggtctttttgccttaataatgccgcttttctcacgtgcaatatcctgaattgtaggtccaataattttttcatgatcgagaccaattgtagtaataacacttacttctggcataattacattagtcttgtcatgttctccaccaattcctacctcgataacagcataatcacactttttttgagcaaaatagacgaaagccagtgcgacttcatattcaaaggttactaacgaaaaagttgagtcctgctgctgcaatttctcataagtaccctgcacaatattagctgttttaactaaatcctgatcactaatattttgattatttaactgtattctctcattaaattcatagacatacggtgagacaaaaaggccagtcttttgaccagccttttttagtaggtttgataaatagtatgaagttgaacctttaccattagtgcccgtaatgtgaatcgttttaactagatcttgaggattgcctaattccaacaataaccgcttaataaaagacaaattatttttaggatgtaaatgaggcaaagcatataagtaatcgattacttcttgagctttagtaaatttcaattatttactctctttcaaatcttgaattctttcacgaacaccggctaattgactttcgtagtcagccttcttttccttttccttgttgacaacagcttctggagcgtgaccaacaaagcctttgttagccagcttcttttcacaacgagcaacttcgtcttcaagacgcttttcttctttttccatcttttctagctcatcgtcaacattaacaagttcagttaatggaacaaaaatttgtgcgcctggaattacagcagtcttagctaattttggtgcttcaacttcactagctacagtcaattcctttggatgtaagaagttttcaacgtaatcagcattttcgtccaaaacgcgcttgttagcttcatcgtctaattgaatcatgatgtcgatttgacttgacattggtgcattaacttccatgcggatgttacgtactactttaatagtttcaattaagaaggccatgtcttgatctgcttgcttgttttcaaattccttgtgagtagttggatattcagcaaccataactgacttaccttcatgtggcattgaaagccataatttttcagttacaaatggcataattgggtgaagcaaacgcaagatttggtcaagaatccaaattaagttttcttgctttcttgcctttaattcttcatcgtcaccattcaaagcaaccttagaaatttcaatataccagtcacagaagtcattccaaataaagttgtaagcttcacgaccagcttcaccgaattgatattcatcaaacaagcgagttacttcactaacagtatgattcaagcgatcgaaaatccaacgatctgataaatcaaatttagaagcatctggcatatgagctggtttagcatctgctggcaagttcatgattacaaaacgacttgcattccaaatcttgttaatgaagttccaagcagcagataatttcttaggatcataacgagtatcttgaccaggagcagtaccattaagcaagaaccaacgaagggcgtcggcaccgtatttatcaactacatccattgggtcaacaccgttaccaagtgatttactcatcttgcgaccttgttcatcacgcattaaaccgtgtaaaacaacatcattaaatggacgcttgccagtaaagtgcaaactttggaacatcattcttgatacccagaagaagataatatcgtaaccagttaccaaggcattagttgggaagtagcgcttaaagtcttccgcattagtatcaggccaacctaaagttgaaaatggccataatgcacttgagaaccaagtgtcaagtacgtctggatcttgttcccagttttcaatgtccttaggtgtttcttcacctacataagtttcaccagttttcttattgtaccaagctggaattcggtgcccccaccacaattgacgtgaaatacaccagtcgtgaacatcttccatccagtgatcaagagtttgttcaaatcgttctggaacaaagtttactttgccatcagtcttttgattttccaaaactttgtcagcaagtggcttcatcttaacaaaccattgcttagaaagacgtggttcaacttgaacgccagaacgttctgagtgacctactgagtgaacaattggttctatcttaatcaagtaaccttcttctttaagatccttaactaaggcttcacggcattcaaaacgatccataccagcatacttgccagcttcttcgttcatcgtaccatcatcgttcataacattgattctttcaagattatgacggttaccgacttggaagtcgttagggtcgtgagctggagtaatcttaactaaaccagttccgaattctggatcaacgtgttggtcttcgataattggaatgtgacgaccaacaagtggcaagatcaattctttgccaacaatatccttgtagcgcttatcaccaggtgctaccgcaacggcagtatcaccaaacatcgtttcaggacgagtagtagcaatttctacataacctgaaccatctgcaaatggatacttaatatggtaaaaggcacccttatcatctttgtgaataacttcgatatcacttaaagcggtttgaagtgctggatcccagttgatgatgtattcaccacgataaattaagccttcattgtaaagctgaacaaaaacctttttaacagctttagaaagacccttgtctaaagtaaatctctctcttgaataatcaagtgaaagacccatcttagcccattgacctttgatgattgatgcgtattcatctttccaatcccaaacctgtttaacaaaagcttcacgtcccatttggtgacggtctttgccttgtttacgcaattttgcttcgaccttagcttgggtagcaataccagcatggtccataccaggaaggtaaagagtatcatagccttgcatccgcttaaaacgaattaaagtatcttgaattgcagtatcccaagcgtgacccaagtgcaacttaccagttacatttggtggtggaataacaattgaatatgggtgagcttttttgttacctgatggcttaaataaatcttcatcaagccaggtttgatatctacctttttcaacctcgtttgggttgtatttaggtgctaaatctgtcataaaattcctccaataaaaaagtcctagacatattgtctaggacgatcagttaaaccgcggtaccacctacgttaagcatgtatcaaacatgcttctcttgaagacgataacggcgtataccggattaacctactttttattttcaattaatcagctaatcaagctactagtcaaccttcggcctctcagctgtctggcttttctctgttaataaagtcgacccctcttgattcttgctttggttatgattatagcatgaacttcactcagaaaaaagggttaggaattagtcgtaattaagttagccatatgtctttattcttttaataaatcagcaatacatttttccgatgaatgatattgcttatattgttttaacacgttgattaaatcatcatagtgactattccaaaaataataattttcatcataagatttcacactcttaagatcgttataatactgcttaacaaaatcactaggcttcactttacttttatagttatttgtatatcgctgatagtcttgatgataaagaatgtctagaatttcaatctcaggtctagtacgaagttctactacttcggatactttctttttatacacttctggaagattaaacttttcggttttggaatcaagtatcctataaattttaacctttctacttctaaaccctttattcaaaaattctttagcaaactttttagcatttcgtgctctaattacttcaccttcaagaagatcatcctcgttgaattttagtgcatcgtgttccaatagaacttccataattgctcgttcagtatgaccttctacaataatagcgattagatctgtagagttactcatccattttaaccgccttttctgtagccttctttaaagccatgtaggcatcataatctggagctgtcccacctaaataatctgattcaaaaacatcggctttatttagatcgcttcttacatcagcagttgaatatctttgaagctgaatcttgccttctctcttagtaatatattcttcatcagttctttcaattttatccaaaatttcagtatagtgcgtactaaataccaaagtagctctatttatgttgattttaggattagtaaaatactcaataaaagaatctacaatagcgtgattaaagtgattctccaactcatcaataaagatgatgccaccaacggaaagtgcattaattacctcgccataaagagttatccctttagctgtaccagaagacaagtattttgcaatcgttgtaaaatcattttctgcaatctctgtatctttccctttaaacttcagcttaaacaattgtttagtagcaccagagccctcaggcttgttttcaattttaagatattcaattgttggatctaaaaagtttaaaatttctccaggcacattgccagaaccatacatcaatgcattaaagtcagtaaagaacaaagtatcaaatggtatttgaggataatacttatttttcgaaataatcgctctaaaaatcgaatcatcagacgacaaaattgaagaagctaggtcgcctaattcttttctgtctaattctggttttatatttttgaaatcaaataattttttctttgaaagattaacagttaccttttttcgatataccgtttcagactcaatatgccagcttttacttaaagttttctttaacttgaaaactaaactatccttataaactacatgatcagttccataaaaataagttgtaacactaataggctcatttcctattagcacatccgttagcttagtttgatcaattgacttttccatcacaactgtttgaagaattcctatcaagagtttcatgatcgtagtctttccagtagcattagtccctactagagtgattaaattattcacccataaactgccgagcaaatgagttaatcgatcagaggtattagaagtaacccttgcatcactgaccagtgaaaattcaagatcatcctcaaatagcggatgatcttgaatttctaattttaaaaagtataatttatttttattcataattattcacctaaaattgttttattcaggctaaattttatcatatttttgcattttatacataaaatctgtttaaaatataaataatcctcatcaagtagttactacttcatgaggattatctaaaatattctactttctaatcatcttaactgcttgaatcaaaatcgttggaatcagagccaagccagcaagccacattacttcttgcccagttaacggagtaactgcaaacaagctatgtaacgccggtacaaacaaaatcaaggctaacaaaattgttccgacagcaaatgctgctaaactgtaccagttatttttgaaaccgatcttgaagatactgtgttgtgaacgacaattgaagccatgtaaaagccgagcaaatgtcaatgttgagaacgccatcgtcgttgcaactgcaggactatcttttagtccgatcaaaaaggcagcaattacactaatcgaaatcaacaaaccttgaatagtaatttgactcacaaaggctttgtccaaaataccagccttaggatcacgtggcttacgtttcaaaatatctggatcacctggctccattccaattgctaaagctggaagcgaatcagttaccaagttaataaagagcaattgaaccgctacaaatggtactggtaagccagcgagtgaagcaaataaaacagtgataattgctgaaaggttacctgataacaagtagccaatagcgtttttaatattttcataaactgttctaccgttagcaacagctttgataattgtggcaaaattatcatcggccaaaatcatgctggcagcatctttagatacttcagtaccagtaatccccatcgcgacaccaacatcggccttcttcaaggctggtgcatcgttaacaccgtcaccggtcattgatacgatacgatcttttctctgccatgcattaacaattctgatcttgttttcaggcgatacacgagcataaaccgaaatcttctcaatgttttgatcaagttcttcatcgctcaaagcatctaattcaaggccagttaaagccatgtcaccttcattgaaaataccaattttcttagcaattgcaacggcagtcaccttatggtcaccagtaatcatcacagtcctaatcccggcttccttagcacgagcaactgcagctacactttcttcacgtggtggatccatttctgaaacaaggccaataaaagttaagccatcttctgcttcagtagaaagctcttcatcactttctttataagcaaaagccaaaacacgcaaaccattttctgaaaagtaattgttttgtgccaaaatttctttacgatcttcttcagtcattggacgaatttcatcgccgaaacgaatattgacacagcgtttcaagagcacatcaattgcacctttaacaaaaatagttggtacagtatgaatcaaatgcttagtactcatcagcttacgatctgagtcaaatggtacttcttccagacgcttagaatgttcgcgtaattcttgttctgataagcctaaaacaccattacctaagtcaattccgggcacttgacgatacatttccagcaaggctgactcagtcggatcaccaattgccttatcttcggccaaacttgcatcgttgttaagcactacatcataaagcaagtagcggtgaagttgattactcaaatccagctcatttggctttaaaactttaccaccaatatagatgtcctcaacagtcatcttattttgagttaacgtaccagtcttatctgaacaaattactgatacagaccctaaagattctacggctgccaagtttttaataatagcattttctttagccattttttgcgtacccattgcttgcacaatagttacgatagaactcaaagcttcaggaattgcagcaacagctaaagctactgcaaatagcagtgaatcaagcagcggttgaccacgccacatttgaataccaaagatcacagcacacaagattaaaatagcagtagccaatcgtgatgaaaactggtcaagtgatacttgcagcggagtgcgacgttccttagtttcattcatcaaggaagcaatcttaccaatttcagtctgcatccccgttgccgttaccacaaccgtagcacgcccataagttactaaggaactggagtaaaccatgttaacccgatcagctagcggcacttctttttcaaaatcagtgtccaacttgtcaacattagtcgattcaccagttaatgaactttcgttgacttgcagagaataattttctaaaattcgaccatctgcagtaactaagtcacctgcttctaacaaaagaatgtcgccaggtaccaagtccttggcctcaatctccattttttggccattacgcaaaactttagccgttggcgcagataatgactttagcgattctagcgacttttccgccttaacatgttgtaccgtacccaaaatcgcattcagaatcaatacaacaataattaccaacgtactttccagactgcccgtaaaagcagaaattattgccgcgataattaggatgatcaccattaagtctttaaattgttctaaaaagacctgaaaagtaattttcttctttccttcaactaaagcatttggaccaacttgagctaatttctcttgagcctctttagcgctcagcccctgctttaaatcggtatttaactctttagctatctcgtcttttttctgacgatagtattccatgtaaagccctccctaaacataagagtaatttaagcaaaaaaatagagactactggctaaaacactgtttagtcaatagtctcatcatttaaacttacagcggaaaataaatttcgttctgacgccgtaaatacaatttatgccgattactccctatttacttgtacataattaaaccatatcaagtaggtagttggcaagctattttaactttcttttaggaagttttctaattgttcatcggtaaaatcagaaccgtaattttgttcaaggagatgcatgatctcttgcttggtattaccagttcttttaagtgaagaaactaaaattttgacgcctcgtttaagtccctcttctttaccttcctcacgtgcgtcttgttctcgctccagtattttctcttcgtagtccatgatataatcactccattccgagcaataagataatcatttgtacttcttatctttcaataatccgttagcaatatcagccgaactaactggtacaccgactaaacgctcattttgccacaaatcaaaaaaatcagctggcatcatttgatcaaattcatcatctgaattcattaaatccttataaacacgtgacttctcaaataaatttagagcctgcttaggataaatgtttaatctcttagcaattaagtcgctaattgcttcagctagttgctgatgaaattgcttttcactaatttcgggaatcatctaaccaactccttatctatgaacgttaaagctttgagagctctttctgtcttgaaacaatactgctccgaataaacactcggttttaattttagcagagcctcatctaaatctagattaccatgtttccagcaattaacaacagaaaaaagtttaccatctgctgttgggccaatgacgatatcagaattatcttttatattattcattctattttgaatgacaaacttaatccaatcaatatctgcttggtaaactaatattttcaagtcgggttgatcagcatcgaatacatatctatttaatgtcggttgacctgaatatctagccttacgctttgcccatttttctgcttgtctacgattagcagtcacataaaagccattaccaaaatcagttgtaaaaacatttttatttatacgaggctgataaacagcctgattgcttccatgatacaaaatgactttggtattgcttttcatgaatcgtgatgtatgcgtatttttcatcgcgcacctctttcataaatagtaggacaaaattatcctccactatttattacgcaaaaaagcacgatttttttgtgagaaattaaaataaaaaaagaaaatgcctgagaattatatcccagacattcaccaatttacggctctttctcatttctcttccttcacaatataaattggtcgttctttaacttgtaaatagattttaccaatataacggccaataattccgatacacaaaagctgcaaaccgccaatcaataaaataattgaaattgtgctggcccagcccaaaatacttgaaccaggaactattagtttacgaacaattacaaaaataagaccaataattgacaaaatgaatgaagttgtcccaatccaaacagctaagttaagcggtgcttgagaaaaatcagcaatcccgcccaacgcatatttgaataatttgtgagtcgtccaatcagtttcaccagctacgcgctcgacattgtggtactcaagatacttagtcttaaaaccaacccaagcaaaaatacctttagaaaagcggctgtattctttcattgataaaactgcgttaaccatctgcctggtcatcatgcgatagtcgcgtacgcctgaaacaatttccactttagaaatgcgattaatcaccttataaaattgattgctcaagaaagacttaaacttaccttcccctttacgatctactcgtctgcagccaactgcatcatagtcaccagtctgcaaaattttatacatttttggtaaaagtgaaggcggatcttgcaaatctacatccattaagacaatataatctcccgttgcagctgataggcccgcatagatagcggattccttaccaaagttacgagaaaaagaaatatagtgaacatgtttgtcctgctcatgcaattttttcaattcggtcagtgtgttatcattggagccatcatctacaaaccaatattcgggcgtcactttgggcattttagctaatactttttgcactgctggataaaaaagtggaattgtttcttgttcattaaaacaaggaaccacaattgataatttttccattagatttcttctttcttagcttttctaaaagtaactactttattaattacaaattgaattaaagttgctacaaaagttgctactattttaacgattaagtgcggataacccaatttagtaacgaaaataaatagggaaaccgtagtaaataccgtggtaatctgaccaacgataaaataagaaataaatcttaatatcatgcgatcatgaactttaaagttagtataagaattccataaaaagttattgatgatcccgcaggtagacgaaataatgttagctatttcaacattcatcttgaaatgcgtcaaaattgtataaattccaaaatcaacgactagccctaatacgccaattagaacatactttactaattgaacaaaatcttctgaatagattgctgttttgattttttccataattattcctaataaaaaatccagacaagaggtcctggatttcaacatatttaactaatatggtcttaattatatcattgtttttaagctctacgttttcattattaaagttaaaactttaataggaacaccttttgcattaattataatttttgtcattcaatctatctgtcttgttagtatcctcatacaaatgataggaactcttaatcttatgcctgccttgtggatcaaacatgcagagaaagataacatagcaacactttaaatttcgatatgtgctgcatttcaaaatcatacagatttccatcaacatcctcaaccaaaatatcgagaataacagctttttgcttagggtgtttgggatcagcgacctttctctgcttctgcagataatgaatatctctaatctcaatctccggcaccagtccctgtaggacatgcttgcaaaaattcttgttagacataatctcaccaaagattacatcctctgtgaagccaaaccagggcttctttttcttgtgcgtattttccattgcgcacctctttcataaatagtaggacagaattatcttccactatttattacgcaaaaaagtgcaatttttttgtgagaaattgaagttttttaaagttttacccaactatatcttccaacttcaattccagatattctccccgctttaagttagcaggcaagcttaactttcccatcgaaattcgctctagctcaacgactttcatccctaccgcaccaaacatacgcttgatctggtgatatttaccttcacaaattttaatttcagttgtagacctatcgtgctcttcatcctgggataatatcttcaattctgctggctgcagtttggtcccatcgcctagtgtcattcctgaagcaaaagttttaacagttgcatcattagctacaccagcaatttcagcacgataaactttatcaacatgcttaccaggtgcaagcaattcatgattcaactgaccatcattcgtcaaaaggagcaagccagtagtatccttgtccaaacggccaactggcacgattccttgataacggtcctgcggtgcaagcaaggaaatcaccgttggctgattgcgatcttccgtcgctgacaaaacacctttaggtttattcaataagaaataatgatatttttgataagcaacagcatctccgttaacggtaacctgatcgctttctttaacttgctgctttggcgttttaacaatcacatcattaaccgcaacaattccttttttaattaattggtgtacttcttttcgtgagccaacattcatattggccaaatatttatctatgcgcattatgtctttctttcgttcttatgtgttgattaatattaattatataagaaagttaacccaatttcgaattgcgacactaatcaaaaacggtcgattttgttttcgaccgtttttacgcgcgttttgcgcgcgattatttgcttaaaatatattttgtagctctgccttcacccattcttctaatataaccttgtttttctagttgccgcaaaatcttcaaaactttcgtcctaccaaacttactcatttggctaatttgcttcgtagtatccgcaccttcatgaattatttgatatactttcttttcatcattagacagatcgtccgtaataaattttaaaactggcaatattatctttatcgaattatcaaaaatttcaaactgcggttgaaccaaactacttctataagaatcatttattcttcttacacctgtaccaaattgctcaattaatcctaacctaaagaaaacattagcaataattggattacgcaaaatggaaatctgacctgaaagatattcttctttgctaagtccttgtggcaatccacctggagatactacttcaattctgtcatcatacatagaaattttaatttgcgaattaatgttccaaactcgatgaactaaggcattggctattgcctcacgaaaagcttcttctggaatctgacttacaatatttcgcgttgctccctgtatttcttcatgttgataatattgacgatatttttgaattgcttgcttatactctttaagaatagattcatgctcataacttgctcgatcaagcataatattaatgctttcaccaaaccgaacaatatcaattccacgataattatttttgtctgccaaaagctcaccggcattaggaaactgtcaaatcttttgtgtaaatagatctttctcgtaaattgattttttaattatttatttaatcaaagtaggattctaaggtgtcctgaacctgaccaaagcctttatgaattcgattgaaataacggtcattgtagctcattgcctggatgccaataaatgcatcaagcgactgttcagttggaaattctgccttaggcttagctttacgcttgatgacgttgttaaaggattcaatcatattggttgaataaattgaagctctgatttgtttgggataattgtagaagactagcagatcgggctcaatttccttcaaacctttgatgacatggctataagctttattccatttggcatagaatttgtgcaagacagctgcagcttcttttttgcttgtctgttgatgtatctgcttgaattcgttcatgatcttttcacgatcgtcgacgcgtactttagcgcagatattgcgcatgacatgaaccaggcagcgttgaaaatgagctttaggataagtcctggccaaggctgttttcatgccaacaacaccatcagaaagaaaaagctcaacttgcttcaagcctctggacttcatgttttgaagcatctctgtccaaacttcaatgttctcactaggagcaatgcagtagtcaatgacttccttatgtccattaggtttaatgccaatggcaatatagactgcttcacgctcaaacgtttctcggcgcaaaggaaggtatgtcgcatccaaatagacacagaaaaacttgtcgcttagcttgcgcttgtgataagcctcaatcttggggagcatctgcttggaaatatttgatacttgagctggactataatgactgccatacattttctcaatcaagtcagcgatttctctggtagttacgcctttggagtatagcttgataatcgtgctttccaaaacatcagagtgctgcttgtagtcaggcagcgtgtgctgatgaaactgaccgttgcggtctcgaggcacttgcacttcaattggtccaaactgggtatcaaccttgcggaaataagcaccatttctagaattgccagtattccagccatttctggcatagggatcatagcctagaaaggcagtcaactcagcttctagcaagttattaacagcctgttgtagctctttgcgcaataaatcatttattttgtctggattgaatagagcttgagcaaaatctttggtaaaatcattcatgaaggagttcttctttctgtatgtgtttttttgttcaaaccaatcatacgagaaaggaactcctttttctaatgtttaaagaaataaatttaaggaatcattcatccttacacaaactattttacagtctcggcattagtgtaactagtatccttacgctctaaattaagcgtaatcaatatatcagatgttaaacttttaattcctatcttttcttttaatgcttcttctaaaatgttaaatgacaaattttggttcatcgcggttaaactatcataggttctattttcaccaattaagattaactgtgataattcagatcggtccacttcgatcgaagcactgtcattactcttataggcctttgatttgtataaatatggaggattaactccttgctttactgttaaagtaaccacattagttttaggatcaatttctaaattataatctggatttggtttgatcgaatcgttgattttattttcaacatttaaacaaaattcaactggatttttcacaccaacgattgatccatcatcctttattccaaatttaattttgccactgccataatttgcaaatgcactaaccgtttttagaaaagtattcgtcaatttctctttaaattctaaatttttggtttctctcatttaggtcaccgtttctaaactatttagttataattatactctttcacgcgcaaaaaaacggtcgaaaacgaaatcgaccgtttttacgcgcgttttgcgcgtgcctattatattaactttaaatcaatacataatactactagaagtttccatattaacaccatatctttctaaataattaaactgtatcatattaaatttcaaaaacaccagtgaaattaatcctctataacaagtcagcgtcttcttgagctttatcatccaagaatttttcatttggataaattggcgtaatctcaataccagccattgccctttcaatcaggccttcaacgtcaagacgagcttcatattcacgcgctttttccaactttggcttagtcttaggacgcggtggagcaaaaattgtacaacaatcttcaaaaggttgaattgataaatcaaaggtaccaatctcttcagctttggcaataatctccgttttatccattgttgcaactgggcgaataaccggagtagtagttacatcattgatagccaccattgattgcaaagtttgagaagcaacttgaccaactgactcaccattaaagatagcccagccgccacgttgtgcacgaatgcggtcagcaagctgcaacataaaacgacgttgcacagtcatcaaatagccttctggcagtttttccttgatcgtttcttgaatttcagcaaacggtacggcaataaaattaatcttaccagcgtagtttgccaaaataccagtcaattccttagccttagccaatgccttttcagtagtgtaaggtggactaaagaagtgaaccatttcaatatctactccgcgcttcaatgccagccatgaagcaactggggaatcaatcccaccactaagcatcatcacagccttaccagcagtaccaacgggcatcccgccaacaccatggagcaactgattagaaatataaacggcatcttgacgaacttcgattctcaagaccaaatcaggatgcttcatttcagccttcaagccatccatatgatcaaacaagtagtcaccaactagattattcaattgattagtgtcgtattcaaacttgtggtcactacgcttggtattaaccttaaaagtcattcctggcttaaaagtctcttgcatcaattccaaagaagtcttttcaatatcttcaagagtcttaggaatcttaattgctggtgagtaagtttgaattccaaataccttcttcagacgttggtcaacatccttgaatgatgcgccattcaggacaatgtgcatccgatcatgacgaggatgaaattcaatttgtgggaaatccttaagaactttttcaacgttacttgctaagcgattgatgaagtcctttctgttcttccccttagttgaaagctcgccatagcgaaccataacttctgtgtattccattaattttctcccaaatgattaattttagcaaaatgattatagatcttgtcaaagaccttaataaattcatccgcttcttgaagcgtattcgtctcatcaaaacttaaacgaattgcactagtagcaatcttatcatcaattcgcatagaaaccaaggtgctagcctcatctgccgtctttgatgcacaagcagaagtagttgaagtataaatatcttgatcttctagcgtatgaaccaaagtttcgccccgaattccctctaaagcaaagcaaagaatatgtggtgcaaagccatcgcttactggtgaaaaaatattaatccctggtttatcttttagataatcaacaattttagccttaatttctgcttcacgcttggccttttctggttcatcttctaaaagcaaacgaattgccatagccattcccgcaattgcaggcaagttctcagtacctgaacgcaagcccttttcttgaccaccaccatcgtgtaatggggtcagcatcttgccttcttttttatataaaatacctataccacgtggtgcatggaacttatgcgcagataagctcgagaggtctactcttggtgtaaaaaccttatcccaaatatttttgccaagtgcctgaacgttatcaacatggaactgaatcgttggataattttcaagcaaatcgctaatctcatcaattggttgaatggtgccaatttcgttattaacgcccatgattgaaaccaaagttgtatcagaatcaatcgcgtttcttaagtcattaacgttaactcggccttccttatcaactggcaatctggtaacgcgccaacccaaattctctaacgcgttaaaactattggctacagatgcatgttccacgctagaagtgataatatgcttaccaaattcacgcttttgaattgcagtccccttaattgcggcattatttgattctgttccaccagaagtgaagaaaatttcatgctgcttagtccccagcaaatcagcaatttgtttacgtgacgcctcaagcaattggtgtgcacgatcacccatcttatgcaaactcgaaggattgccccaaatattagtcgctactttattgtaagtatccaatacttgtggatctatcttcgttgttgcactattatcaaaataaatcactatcattaccccttcatttaaaaaacggtcaatcgcttgaccgtttcaagacttttcaattttagcttaaataatgaatcgcttcaattaattactcttctcttctgaataatatgcattttcaagtcgttgataactacctggctctaccttttcaattgctgtagcaattgtatcaagggcttccttatagttatattcattatatagctgcattgctgtcttttgtgcttgcgcaattgaatccttatctgcatatttatttgaatactgcatcgtcaattcaactaggttagcggaattaatgatgtcatctgcttcacgtttaagccgctccacatcatcagaaatttgaattaattcagctgagatcttttccatattaatccggacctgacttaattcgttgctgacatgaccaatctcgttgactaccaaagtgtacatttggacaaagctatcaggattgccaggcaaatttcgtctttcaagtcgacgataaactaatgaaacttcttgcttaaagcgcttgattgaatcattagctacattttcagaatcataaagtccatcaacgtcagttgacatcttagcctgctctgcatcaatttcacgcaggcgatctagcatctggagccatgaatcttgaatagcagagtaaacacccttaccatctgcgatattctgtgtatcaatagtgtactgatggtacatttcattgacttctttttctaagtctttactcttttccaattcgccatgagtcaattcatagctctcatcaatatgccgcaacttttctaccagtttctttgacgcggtttgctgatgtgagatcaaagtcagcattttactttgatttttttcaacaaatggtcttgccttgtattccttagctaaaacatcatacaggtcgtcaatttcgccagagatctttttattttccttggctaattcatccaccttagtctcagctagcaatttgcgcgcaccatcaatttcatcatgaatttccttgattctgcccaaaacatctacgctagtaaggtaatatttttctgaaatcatttttttataagcatcagacaattccttaagctgatcttggaacactacttcaagctgatgataaccctcttttagcggttttaagcgtttttgtaagttacccaaagacatccgaatcttggacaaaactcgcttagcttcaacatgatcaccttgtgaagaaagattttttgcttcttcaaagtcactctccattgatgctagttgatcttcaacctgatcaatcgcagcaccatattcaaaggaattggctaagatatcttttcttaattcacgataaactttaatcaaagcatcatattgaatttgattttccttatttgattcaagtagttccgtgaaaactgccttggtgttacgagcatcttcgagcgttggcttgataatctcctgtgcttgtttaatattctttcttgctttaaacaagcgataagttgcattttcattagcagcttcttcaactagcttatgcactcgcggtaattttttcttagctgcttcagtgtagctcttgcgccaagtatttaatgtagttaaactttcgccggccaaatccattttatccagtcgcgtaatatcatcttctagatgcatcttctcaatttcagtcactgctgcatcaatcgcttcaatttcttttagttgtttacgattgatcattagcattgctgcaactacgacaatgattaggatcaccacggcaataattataatagcttgaattgatgacatagtttatcctccaaaactatcataattataacaaaacctgaccctaataggtgcaaaaagctgttctattttcttgatttattattctgaactctatataatactattcgtgtaaaatatttgcagcaataagtgacaagaacgtcaacatcttgaaacgctttagtgaacgagtaacccgcgctgcattgggcgaaaatgtaaatccaagatgcacgaatgttgaacttatgcttaatattttactccaaaaattattgtttaaattttatggaggattttttatgtcaagatatacaggtccaagttggaaacgttcaagaagattgggtatttccctttcaggtactggtaaggaaatttctcgtcgtaactacgctccaggtcaacacggtcctaacaaccgcggtcgtttgtcagaatacggtcaacaattgcacgaaaagcaaaagttacgttggatgtacggcttaaacgaacgtcaatttagaactttgttcacccgcgctggtaagattcgtgaaggtcaacacggcgttaacttcatgattttacttgaacgtcgtttggacagtcttgtttaccgtcttggtttagctactactagagaacaagctagacaattggtaaaccacggtcacattactgttgatggcaagcgtgttgacattccttcatacgaagtcaaggttggtcaaactattggcttgaaggaaaagtcaaagaacttacaacaagttaaggatgccttagaagcagttactgctcgtccatcatttgtttcatttgatgaaaacaaaatggaaggtactcttgtacgtttaccagaacgtgacgaaatggaaccagaaattgatgaagccttagttgttgaatggtacaacaagttactttaatttttacattttattttgtcgaaagtctttctcaatcgagaaaggcttttttctttgctacaataagtacataaaaagaaaggatgattagatgactgaagatttaaataaacgtgttgaacaagcagctcaaggtattactccacaaactaagcctgatgaacgccgcagatttttaggttcattacgtgagcgctgcttaatccgtatggacaatactgaagttaaaaatcctgaattaactgccctatttcttaaacatatcactgactttaagggctatactattttgatcaatggcaatatcactgatgatggcttcttgggagacattgaagccagttgcagcaaatatgatattcccttcactttagttaacaatgaaaccgcaaaaacaggaccacatgatacggcagtactagttgtagcgaaaaacgctatcaatcgaccacgaattgagctaaagcaagtttatccacctgagtttcctaaagaagaattagccgcacctaaaacaaaagaaagtttttggcataaactttttcacggagataagtaaatgaaaccattagcatatcgtatgcgaccaactaatttagacgaagttgttggtcaaaggcatctgattggtccaggcaaaattattcgccgaatggtggaagctagacttctgtcttcaatgatcctttacggccctcctggcatcggtaagacaagtattgctagtgctattgcaggctcaactaaatatgcctttagaaagctcaatgcagctactgacggcaaaaagcaattgcaacaagtagccgaagaaggcaaaatgagtgggacagttgtcttattgctggacgaaattcatcgtttggacaaaactaagcaggacttcttactgcctttgctagaatcgggacaaatcattttaattggggcaactactgagaacccttatatttcgatctcccctgctattcgttcacgttgccaaatttttgaattaaagcctctttctacagatgatgcttctcatgcaatcgatcgcgcattgaacgataaagaaaaaggtctaggcaaatataatgttgaattaacagatgatgcgcgtgctcttttgattgaaaaaggcaacggtgatttgcggtctactttgaatagtttagaattagctgttctttcaactaagcaagaattgcaagataaacaccaagatgatcaaaaaattatcatcactcaaaaagaaatggctgattcaattcaaatgaaggtgcaaaactttgatgcttctggtgatggacattacgatctagtctcagcatttcaaaaatcaattcgtggctctgatacagatgcagcgctgcactatcttgcccgattaattgaatctggtgacttagtctctatctgtcgaagactagcagtaattgcctacgaagatattggactagccgatccagacgcagctgaacacgctatagtagccatccaagctgcacaaatggttggcttgcctgaagcacgaattccactggctaatgcggttattgagttagctctttctgccaaaagcaatagtgccatttcagcaattgatgctgcactagctgatattcgaaccaaaaaagttgactcaattcccgccaacctaaaagatgctcattactctggtgccaaaaagcttggacatggcgtgaactacctttatcctcatgattatcaaaatgattgggtagcacaacaatacttgcctaataacctgcttcatgccagctactttgcacctaaaggcaattctaaaatcgaagctagatataaggcaacctatcaaaaattaaaacaaatgcagtctgataacttgcgcaataatcactaatctcgcgcattcaatatggttgacaagcacctgtaatatgcgtattataataagtgatctgagttgatcgacaagcttaaatgtataaagttgaccgatcaaactataagacgtgggagttggcaaataactaccgaatcggaatactgccttgttgcaggatccatattcgctgcgatgccagctaaaattttgaacattgcgggttcaacaagcgtcattatgctatgtttagtcaactcggatttctttagaatattaaaaaaggcggtctcaattgaccgtctttttctatagtggagactgttaaatggcaataaagattgtaatgattatttttatccttctcctactgttaacctcgtggtacatgtggcacagaaggaacggacattttttaatttatgacattggtggcgatccacgcttgagcaatattcttaagtggacttcagtcgcccttttagctgaaagtattttagggattattttgctattcatgggtaataaatatttaaatctaatcaccttattcttagcttcattaactattttggcttttggtttatcaattactcaaaataaagaataataattcactaatgacaagcaaaattttggtaaaatagaatatagaaagaggtgcttatatatgctttcacaatacaagaatattcaagttgcagttgatggttcaaaagaagctgacttggccttcagcaaggctgtagccatcgccaagcgtaaccatgcaacactagaaatcttacacgtaattgatactcgttctttccaaaatgtttcaagttttgattcagcaatggtagaacaagtttctaaagatgctgaaaagagaatgaaggattaccaagctcgtgccactaaggctggcgctgaagatgttcactactctattgaatttggttcacctaagacaatcattggacatgacttccctaagaagcacaatattgatttaatcgttgtgggtgctactggtttgaacgctgttgaacgtctgctcatcggtagtgttaccgaatacgtaaccagaacttctaaatgtgacgtcttggtatgtcgtactgaagaagttaaggatgctttgcaaggctaattatttagctttaataaccgataaaaaaatacctccaaaattcagatttgaatttttggaggatttttttaatgttatttctaaaaatcgccagccgtactgaacatgtaatcacgattatggaacttcatcgacaagattaatccaatcccaatcatgtttcccatcagagctgaaccaccctgagaaacaaatggcaatggaatacctgtcaatggcaataaatcaatattcatcccaatattttcaaatacgtggaacaagatcatcatgataacaccagttgcaatgtatgaataaaagacatttctggtatcgaacgagatttttaccatttgaataatcaggtataaataaatcaaaatcaatgctacacagccgacaaaaccaaagttttcaccaattaccgagaaaaccatgtctgatccacgaactggaacataaacgctagctttgccaaaaccattaccaaatagttgaccagaaccaatggctttcatactttgccataactgataagctcctgatgaagtatcaccagatggatcgagccaagacttaattcgttcaaattgatatgcttgaaagaaatgactcaacaatgattgcccagccgacgtagttactaatacaataaccccaatagctgctaaaatcaaaataccatataacggtacaataattttccaagaaatccctgatactaaaaccacgccaccaacgatggcaataaatactaacatagtaccaaagtcattctgtaactttagtaaaattgctaccggtgccagccaagcaataattttgcctaataacaaccaatcggtcttaatcgtgtgaccatatttatcattatgctctttgaccactcgagccaacatcaagataaaagctggcttcataatttctgaaggctgaaaagtaatcggccctagtttgaaccaacttttcgcacctgtatctgcagctacgcttctgttatataagaatagcaccgcaatcagcaaaaatattccgattccaaagaaaattggcgcaatcttaaacaactgttctgcatcaaactgcatcacaaccataataattgcaattgaaatcaagtaccataatgcctgcataactactgccctaacaggtgaaccaatatgactaggatcacctaatgcagcaacatagatacaatacaagctaattaaagccaagagtagcactggtataataatattccaggctaatcgatcgaatagacttgtttcattttcaacttttgccattaaataatcactacttatattttatttttcatgtaaggtaaagtatgaaagtaagtcattaatgctgctttcaagactgttagcaaacaaaatattgcttgtcttagaagtagtagcacgataacgcccctctaccttttcaattaaaccaatggactttctattaggaataacaacttcccacgttggcaaattctttcccttaagttcattaacttcaatatcaatattctctaattttttagacataaatcctcctacttgctatccggatgaaattttgaagcaataattggatcttcatatctctccggatgtggatttcgaaaaatagtaaaattatcaggaactggatccactccacccttgataaatgggttacaccttagtatacgacaaattcccataatcagccccaaaataggaccatgttttttcaatgcatcaatcatgtaattggagcatgttggataataccgacaacttggtggtagtaaaggtgaaatcactgtctgataaatacgtacaataaaaatcaaaatcttacgcaagtaatctcctcacttagtgtcgttgatgcttttcaatatttttaagcaaagtacctgttcctaaagcaactgcttctaatggatgatcagcaattaaaactggaacttgcaaataataagaaatcaacttatcaatattctttaatagggctccaccacctgttagcatgattccgcgatcaataatatctgctgaaagctctggtggagttgtttccaatacttctttagctgctgcaatgattgacatcaagcctggttctaaagccttttgaatctctggtgcagtaactgtagtctgcttaggcaaaccatcaactacgtcacgaccacgaacagtaatttgttcatcttggtctggttcaaaggcgctaccaatttcaatcttaatttgttcagcagttctagaaccgattaacaaattatgcttactcttaatgtaactgatgacagcctggttcatccgatcgccagcataacgtaatgattgagaagttacaatttcacccattgataaaactgcaacgtcagtggtacccccaccgatatcaatcaccatattaccttgcggtttaaaaatatccaagcctgcaccaacagccgcaactttaggttcaaagtctaaataaaccttgccgccaccagacttttcagctgcctgaataattgctttttgttcaattgaagtaactccagtaggagcacaaatcaaaatatttggcttggacataaagccttttacatttaatttttcaataaagtaagacagcattgcttcggtaatgtcaaaatcagcaattaccccattcttcaaggggcgaattactcgaatattacctggagttcttcctaccatctcatatgcctctgaaccaactgcaactaccttgtttgtatcggtatttacagctacaacagaaggttcatttaatacgatacctttaccagagacattgatcagtacgtttgctgtccccaaatcaattcctatatctcgtgccacgataaccctccataattattcaccgtccattttaccataaataatcatgactttcctttactgtccttgttttaacacaatctttaaaacaaattactcaattgcattgaagtatcgataaaagtaatgacaaaattgccaactaaaaagcctaagccaattgcaataaataaatataataattgcgtttcaaaaacatggcctttacgaataattttatctagttgaattgctttaactgcttgaaaagataagccaatcgcaatcaaatatataatgatactaataatgacatgaacgcctaattgaaacatatattttcctcaattttgacaaaaaaagacggatgcagcattttgtgcattcgtctcttccttcttctagtgacctttagtgttgtacacgctaattctgttcattgctcgtcttaaagcaacttcagcacgtgccatagtttgttcgtcatgtttttcccgtgcttccttcaaacgttgctcagcgcgttgcttcgctgcctcagcacgagaaacatcaatgtttcttgcgcgttcagcactatctgcaataatcgtagcaacattattcgaaaactcaatatagccacccgaaatcgcaatatgatcaactactgaatccatttcacggcttcgcttaatcttaacctcactaataactagtggagttaaaagtggtacgtggttatacatgattgaacgttcaccatcaacggcacgtacatcaacgatacttccacgatgtgaataaatcattccattaggagttacaacatctactttaaaaagcttctctggatctgccatttgacatcaccctacttttctagtaaagctttagcttctggatcacttggagttacacccatttcttgtgcttttttcaaaacatcttcaattgggccgacaccacgaaaggcatcttctggtaagtcatcaagatgaccatccaaaataagcttaaagcccttaatgctttccttaattggaacatatgaacctggtacaccagtaaattgttctgcaacaaagaagttttgtgacaagaagaattggaccttacgtgcacgtgcaacgatcaatttttcttcatcagacaattcatccatacctaaaacagaaataatatcctgtaattcatggtaacgttgtaaaacatgttgtactcgagtagctacttcatagtgttcttcaccaacaacttcagggtcaagggcacttgatgaagattcaagtgggtcaacagctggataaataccttgttctactaagctacgttccaagttagtagtagcatccaagtgtgcgaatgtggttgatggagctgggtcagtatagtcatcggcaggaacataaacggcttgaattgaagtaattgaacccttcttagtagaagtaattctttcctgcaattgtcccatttctgttgctaaagttggctgataaccaacggcacttggcatacgaccaagcaaagctgaaacttctgaaccagcctgagtaaaccggaagatattgtcgataaagagcaacacgtcttgaccctcaacatctctaaagtattcagcaagtgtcaaaccagttaacgcaacacgcattctggcaccaggcggctcgttcatctgaccaaataccatggccgttttacttaaaacgcctgaagctttcatttcgaagtaaaggtcgttaccttcacgagttctttcaccaacaccagtaaatacggaaataccaccatgttcttgagcaatgttgtgaattaattcctgaatgatagtagtcttaccaacaccggcaccaccgaacaaaccaactttaccaccacgtacatatggctcaagcaagtcgataaccttgataccagtttcaagaatttcacgactagtagtcaagtctgcgtacttaggtgcttccttgtggataccttcacgagggtgatcttttgaaaattctggaccaccgtcaattggttgacccaaaacgttaaacacgcgtcctaaagtatcttcaccaactggaacggaaattggaccgccagtatcttcgactttcataccacgacgaagaccatcggtagattccatggcgatcgttcttaagacaccatcaccaagctcaagtgtaacttcaaggacaatgctttcatcctctgacttaattacacgcaaggcattgttaatatcaggtaaattcttatcaattgggaatttaacatcgacaactgggccgattacttgaacgatttcaccttcactcaaaacatctacctccttttctttattactctaaggcatttgcaccactgataatttcagtaatttcagtagtaatttgtgcctgtctagcacgatttaattttgtagttaagtttgataccagatcattagcattatcagtcgcactctgcatggctgtcattgaactagcatgttcggcagtcttagcatccaaaatagcaccgtaaatagtagaacgtgcatattgtggtaacaacttcattaacacttgatttggatctggttcaatatcgtattctaattctttatgtgcttcagcttctttgacaccaatatctaaatcgacgattggtaacattttttcaacacgaaaagcagatgataatgagttaacgtggtgagtataacatacgtaaagctggtcatagacaccattcaaaaacatcttaattgcggttgaaacaattggtaaggcttcatcaaaagttggtacatccgaaacaccattcttttcataaacaacgttaatattgttctttttaaagaattgtgccgcaaccgaacctacagcaagaactttgatatcgtgtccttgagcacgttcgtcctcaaagatactcatcatattcttaatgacattgctgttataagaacctacaagaccacggtcacctgaaattaccaagaaacctgttgtcttgatattcttacgtggctgaatcatatctgccgtaatccccaaaccaaagacatcagtataatcaatttgagcaacattgttcttatcaattgagacgtctttttcacgtatattatcaactacttctgagctaattaaacgagaaatagttctacgaatatggtcgttataaacggtataacctttatcacgattttcagtttggttcaactttgaagcagagaccattctcatagcttctgtaatcttaccagtttgttttactgaagcaatttttttctttaactcaagtaaagatgcaggcatattctacctcctatttctcacttggtgtaaagctctcactgaattcttcaattgctgctgacaatttcttatcatctggcaattgactagtttcacgaattgtcttgagcaaatcagcatgactgctgtcaaagttatcaaataattcgttttggaaacgagcaatatcttcaactggaacagcgtcaagatatccgtgagtcaaagcataaagaatcacaacttgcttttcaacaggaattggatcatgaagtggttgtttcaatacttcaacggttctttgacctctattcaacttagcttgagtagcttgatcaagatcactaccaaattgagcgaaactttcaagttcacggtaagctgcaaggtcagtacgcaaagtaccagcaaccttcttcattgccttgatctgggcgttaccaccaacacgagaaactgagttaccagcatcgatggctggacgagtaccagcaaagaacaaatcgctttgcaagaaaatctgtccatcagtaattgaaattacgttggttggaatatatgcagaaatatccccagcttcagtttgaataattggcaaagctgttaatgaaccgccgccaagtttgtcattcaacttagcactacgttcaagcaaacgtgagtgtaagtagaaaacatcacctggataagcttcacgaccaggcggacgacggagaagcaaggaaagttcacggtaagcgacggcttgtttggataggtcgtcaaatacgattaatacatccctgccattgtacataaattcctcacccatagcagtaccagcatatggtgcaatataaagcattggtgctggctcacttgggcccgcttcaacaacaatggtataatccattgcgccaaaacgctttaaagtttctacttgagttctaacggttgattccttttgaccaacagcaacgtaaatacaaattacgtcttgccccttttggttaaggatagtgtcgatggccaaactagttttaccagtcttacggtcaccgataatcaattcacgctgaccacgaccgattggaactaaggcatcgatagccttaataccagtttgaagtggttgatcaactgattgtcgatccataacccccggagccttggcttcaattggacgactcttgtcagtcttaatttcacccaaaccgtccactggttgacccaatgggttaactactctaccgattaaggcgtcaccaacaggaacttccatgattcgtccagttctttgaacacggtcaccttcacgaatattgtcaaattgacccaaaataatgatacctacatcatttgattcaaggttttgtgcaataccgtatgagccgttatcaaacttcaataactcaccggacaaaacatcgttaagtccgtgagcacgggcgataccatcaccaacataagttacaacaccaacttcgctgatgtcgagcttatcgtcgtaatgttcaagttgttgcttgatcaaggaactaatttcttccgctttaatgctcaatggtttcacctcttttaatttttatcaattatctgcgcacggatcttcttcagtttattcttaactgatccatcaatcacgcgatcttctacttgaagaaccacgccgcctaaaatacttggatcaactttattctctagacgcaccacgtttaggttatatttcttagcaaaactttcacctaaacgcttgagttgatcatcatctagcttaacagccgtagttgcaacgccagatgcgaccttcttttcattatcataaagtaagacaaagcgatcaataatatcgatcaaatcagcaaaacgatcatatttaaataacaaattcaaaaagttttgaacctcatctgaaaaatctttttcaattgcagtcaaaagatcctttttatctttactacttaaaataggatcgctcaagacactaatgatttgtggattggcttcagcagccttttttaattccaccatttcattataaacagtgtctaatgcatcattgtcttgcgcataaccaaatagtgcggcaccgtagcgtgctgcaatttcttctctacttaaagccattaatcatccaaccccttaataaattggtcgactaaatctttttggtctttagcagataaattcttagcaattactttttcagcgattgctacagaaatatcagcaacttgatcgcgtgcagaattcaaagcgtctgcttttgcctgagcggcatcttcattagcctttttgcgaattgctgcagcatcttcgtttgcatttgctacgatttctttacttgtgttttgcgcgttactcttagcgtcagagagaatttgtgttgcttcttgtcttgagttcttcaaggcagcttcacgctcattagcaagcgtttcagctttctttcgttcactagcagctgaatccaagtcatcaataactttttgccgccgcttttccatcatatctgatactggtccccaagcaaagtgcttaataagaagcatcaagatggcaaaacagatcaaataccagatagcattacctaagtaaatatgtgaggctgcaaataatgtttgaatagtcatttactgcccttctctctttaatactattcctttaaacagaaaattatctctttttattaaaggaacaaaatcaagaaggcaacaacgatagccaaaataggaacggcttcgatcaaaccaacaccaataaacattgttgctctcaagttacctgcactttcaggttgacgagccataccttcaagagtctttgaaataactttaccgttacccaatgatgcagccaaagctgctaaaccagctgcaatggatgcagcaagatatttaaaagcttctgacataaatttatacctccaaaaatttattctgtagtaaccttcttaccaatgtaaaccattgataaagttacaaaaacatatgcctggatagagccaatgaagacagagaaaccttgccaaatcatggctaatggagctgccaaaactaacgtaaatggtccaccagcatgtgctagatcattaccaattaaagttagcaaaacttcaccagcataaatattcccatatagacgtaatgataaggttaaaaagttggtaaactcttcaattaaattaattggaagcataaaaccaactggttgcgtatagctcttcaaatatccgccaacaccaaatcgttgtacgccgaatgtgaacgatagaagcaaggtcatcattgcaaacgacattgtcgctactggatcagcagttggtgatttaataaacatccaatcatcaactttgacttccatgaacatccctaattggttcataaaccaaataaacaggaataaaacaaatgcatataatgacaggtgattttgagcatccttgtcgctaacgttatctttaacaatgccgttagtgaaatcaagtaaatactcgaacacattttgtctcttattgggtttcatttcaacttttcttgaaagccaaatgcagataaataaaactgctaaaaccattagcgttgaaccgataataccagaaagttcaaaattcaagcccatgaatttaaaaacaaatgatttctccattacttcgtgacctcccttctcgtgctgaataaaactcgaacacgtaaatcatcttaacaccaaaaaaggtctttgtgtaaaatgaaagcgcattagagaaaatatttttctaaaaaggacgattacttagtaccaaatagtctgtcaccagcatcacccaaacctgggaaaatataaccattatccatcaatttgtcatcttcagcagctgcataaatgtcaacgtcaggatttgcttcttgaactgccttaataccttctggagcagctaccaaaacagcaagcttaatttccttaacaccacgcttcttcaatgcagcaatggcatcattagctgagccaccagttgcaagcattggatcaacgactaaacattcacgttcagcaatatcctttggagccttgaagaaatattcatgtggcttcaaagtcttttcgtcacggtacatcccgataacggcaatcttagctgaaggaaccatttcaaggacaccattaagcatccccataccggcacgtaaaattggcacaattgtcaacttcttaccagcaatttccttttggacagtcttacccattggtgtttcaatttcaacatcttcaagtggcaaatctctagtgatttcataggtcattaacccaccaatttcaccaacaatgcgacggaattcatttgaccccgtatccttgcgacgaataatagtcaacttgtgttgaatcaatgggtgatccaaaactacgaactttcccatatatgcctcctataaaaaataatatgatcattaaatattttaatcaaaaacgcaaagggtttaaagccctttgcgttttattttttatttattgaaatgatgtccacctgcagctttattcaatcgattcatgtaagctaaactttcttcaccttcatgaaatccttgtacataaatagtttcgatatcatcttgatcatcgaaatagcgcaagccaccaaataagttatggtcggcatcaactaaattgttgcccagatcaaatttatttgcttgaggtaaattaattttagctaagactggcgctaaagctgctacaccagttttttcattaaaatcaatttttgcaaaatcagcaggatcatcaaccacgactaccggctcacttggagcataatgacggtatttcattcctggtgccttaggtatatctttgtctgacactttgcccgtgttaattaaaactttttcacctaaaacttcgcttaactcttctggagtaatttcaccaggacgaagaacgattggtgtttctaccgataagtcgataattgtcgattctaatcccacacgagtagggccatcatcaataattccggcaatcttcccttttaaatcatggtaaacgtgctctgcagtagtaggactaggcttagttgaggtattagccgatggtcctacaattggataacccaatttagcaattaaatcatgagtcaattgatcatcaggacaacgaaatgctacagtatcaagtcccccagtaactgcatctggcagagttcctggtttaacaaacaatagcaatgtcaaaggacctggccagaaatgtttaattaatttcttagctctttctggaacttctttagcatacttagccatcatttcttcgtcagaaacagtaacgatcaatgggttatcacttggacgtcccttagcagcataaacgcccttcacagacttttctttggttgcaattgcacctagaccatagactgtctcagttggaaaagcaaccaattcacccttagctaacaacttaactgcatcattgatttgatcttttttaaaaatcttcgtttccatcattcttatttttgccaccttccatgaaccatgcgtggcttgccggccatatcttttctaaattcgatttcaaaatcaggcaattctttagcaaacaattccttcagttgttcttcttcgctaaaaccaaattctaagaaaaattctccatggctattcaaatgctcacgcacttgcttagcaaatttcttatagaagtctagaccatctttgccagcaaaaagagcttctttaggttcattttgcaagacattttcatccattacattcttttcgcttgtcttaatatacggcggattagagatgatcttatcaaattcttctaagcccaacagcacgttggctttacgagtagttacatcaagatcataagttaaaaagttttcctcacttgttcttaaggcagtatccgttacatcactagcatataaagttaaatctgtaatgccttttttctgtgcttctttagctaaagccacggtaatacagccagaaccggtacccaagtcaaggacttgatcacctgatttaagtgtctgcaatgcccattcaaccaattcttcagtttcaaaacgaggaatcaagacaccgcgttgcaccataattttatagcccaaaaaccaagcataacccaaaatatactgtggagatatgcccttagccaatttttcgatatctttattggcctgcttaatctggtcagcagttaagtccatttcttgcttcagttcaaattcacttggtgtcaagcctaagcgctctgctagaacataatcaacatcctcaggacgcgcattttcagcactctcacccgctttaatacgcatctgctttaaagtcattttaggcattttgatcagccaactcctctaattgcttagtttggttgtaaagaattaatgcatcaataatttcatcaagttcaccgttcatcacacgatcaagcttgttaatggttaagccgatgcggtgatctgttacacgattttgtggatagttatatgttctaattctttcggaacgatcaccagtaccaactgcattctttctcttagcatcgtactgagcttgattttgactttcataatagtcataaacacgtgatttcaaaatttgcattgccttttcacggttctgttgttgactacgttgatcctgcattgcaactacaatcccggttggcaagtgagtcattctaacggcactagaggtcttgttaatgtgctgaccaccggcaccacttgaacggtaaacatcaacacgaatatccttaggatcaatatcaatgtctacttgctcatattcaggcataacagcaacagtggcagttgaagtatgaacacgtccttgagattcagttactggaatccgttgaacacggtgtgcaccattttcatactttaatttcgaataaaccttgtcaccagtaatcatgattgccacacgtttatagccgccaacctcagtaggttctgaatcaatcattgaaaccttccagttttgacgttcagcatatttttcatacattctaagcaaatcgccagcaaacaaagaagcttcgtcaccaccggcagcaccacggatttccatgataatatctttatcatcgttaggatccttaggcaacatcaaaatcttgatttgatcttcaagctcgggaatttctttctcaatttcagaattttcttccttagccatttcaattaaatcaggatcagtttcactggagataatttctttattatcttcaatctcttttttgtcctctttgtacttcttatatttttgtactacttcacgcaaatcggcttcttccttagaaatctccatgtagcgcttagtatcattaataacttcaggatcggccatcatttcctgaagttcttcatagtgagctactagaccctctaattgagccataactttatccataaactaaaaatcctctctatctttcaacacctgggtgaaagtaatgatagcgacaaacaggataataactttcatcgccaccaatttgtacttgttcaccctcataaacaggcttgccattgttaattcttaaattcattgttgccttgtgtccacaataatgacaaatggtcttcatctcttctattttatcagcaaaaatcaataaattttcactaccttcaaatagatgattttgaaaatcgttttttaagccaaaggtcattactggaatattgaacacatctacaattttagcgcattctaagacatgatgtctcttcaaaaattgtgcctcatcaattaacacacaagctagtttaccatcaccatcagcaacatctgctttgttcatctttttaatataatcaaatagattcatatcagcagtaattggaattgcttctcggtgaagtccaattctagaagcaaccgttcctacaccgctacgattatccaagccactggtcattagggcaatcttgcgcccctgtgcttcataattgtgagctactttcaagatctcaattgttttgccactgctcattgcaccataacgaaaaaataattgcgccatgctggccctcccttttaacaaaaagtcttcgccttaatagtatagaggaaaaaataaatttgtgtaggtattaaacctcgttttcatcctcgctctatgctaaacttagacatagttttaaagtgagggatgtacatgagttttaaatcaggaattgctaaagttgccggtaaatcaagctattggtttttgcataatgcccttaagggcggcaccagttttccaggcaaattagcaatgaaaattgatccagaagttttaaattctttagccaaaggctatgaaactgttattgtcacgggaactaatggtaagacaatgactactgctttgattgttgaagctttaaagaaaaagtatggtgatgtgttaactaatccatctggttccaacatgcaacaaggaatcgtgaccgcttttttggctcacaagcacaagagagttaaaagaaaaatcgctgttctagaagttgatgaagcaaatgttaaaatggtaaccaaattacttcatcctagcgtctttgtattaaccaacattttccgtgatcagatggaccgttatggtgaaatctataccacttatgacaagatcgttaatggtattaaattagcacctgacgctacaattatcgctaacggagatgcaagcattttttcatcagttgaattgcctaataagaaaattttttatggctttaaacttcctgatgacaaacctgaaaatgacttcaaggctccagtcaataccgatggtgttctttgtccaaaatgcgaccacattttacattatcatgaacgtatttatgccaacttaggcgacttcttctgtcctaactgtggctaccaccgtcctgatttaacttttacagttaacaagattattgatcaaacacctaatagctcaacgttccaaatgggcaacaagcaatattccattaatattggtggtacttataacatttataatgccttagccgcctattctgttgcacgccactttggattaactgaagctgaagttgctcaagcttttgcagaaaataaacggatctttggtcgtcaagaattaattcactatggcgataaggatatcgatttaattctagttaaaaacccagttggtttggatgaagtcttgcacatgcttaatacagaaaaagatgattattcactagttgccttgcttaatgccaaccacgctgatggaattgatacttcttggatttgggatgctgattttgaaggattagacaaagaaaagattaaaaagatcctcgtcggtggtcaacgctggcatgatatgggctttagacttgaaattgctggctttgatccaggacaaatgagtactaatccagatgatgatagcctaattgaagaaattaaaaaactgccaactaagaaggtctatattctttcaacttatactgcaatgcttgcacttagaaagaagatggccgaaaagaaaatcattaaggctggtatgtaaatagaaaggattcccgcgggaatccttttttgtgtacaaaaaagctgtagctctaatgctacagcctttctaattattgggatattggggctcgaacccaaacatccaggaaccagaatcctgtgccttaccaatttggctatatcccagtaaatcacccgtacgagaattgaactcataactccaccttgagagggtagcgtcttaaccatttgaccaacgggcgaatcaacatttataattatgcttttttcttctatgcttgtcaagtaattttgactataataatgctaatggatggtgaaacatgatcgactttaataaaacacagcatttaattgaatcaatggtttttgaacgcgttgttccaggcgtcaattacacttttatcaaaaataagcaaatttttacatcaactactggttttgctagtatctacccagaagttactcagctgagcccttttgcagaatacgacctagctagtttgactaaggttttagcaacagaaaatgtcttgcttaagctttatgaccaaggcaaacttaactttactgagcccttgcagcaatttattcctgaatttaaagaccctcgtgtacgcctttatcacttgctaacccatactagtggcattcgtggctggatcccccaccgcgacaaactagatcatgatgccttactacaagcaattatcaatctgccagtaactgacgaatttgaacacaagatgcggtatgccgatacaaactttatcttacttggattagttattaaaaagatttttggcaaacctgtccaagaagtagtcacagagcaagtcctcaatcaaatgccgcttgaaaatactactttttcaccacaaaaggatgattgcgtgcctactgccctagttgatggccatgtcttgcaaggtattccacatgatcctaaagctagacaacttggaatagattgcggttctgctggcttattttccaatcttcaagacttagttaccttcgcccaaggttatttaggactaaaggatgttttaccttatagtcaaaagactgtcagccagctatttgataataaaaatccccaaggcataaaaccacgctcttggggatgggaccttcggtttgatccaaagcaaaattatccgatcattttgcacacgggttttactggtactttaattattcttgatcgcatcaaacgctctggtctaattttattgaccaatcgagtccatccgactggacacaacactgttttcttagctatgcgcgaaaaaattatccatagttttatcaacgaaaacgccaaaatataatttatagaaaaaagacggctgtgtgtcagtcgtctttttatctctcactaaatttcatcatccgtctagtattataacttattttaacgctaatgtactagtcaaatattatttttctgctttaaacattttccagtagctaattaaaatgattaatgccattaataaagtaaaataaaaggctgcctgactaccttgagctgtcgccagtgcataggacgctgcaccctttttcggccaaatcgacataattgctgctaagatagttgttcctacagaaccggctaattgctggctagtctgacaaactgcggttgcatcggcgcgcgatgctcctttttctaccttcaaagcttcagctagcgtgttagaaaatgacattctgtgtcctaacatcatgatgccataaataataatgatcatcatcacagtcaaatttaagccaaaaatagcaaataacaagcagctgatcgccattaagaagccacctaaataaagtggcaatttagctccttttttatcatataggctaccaaaatatggattgagtagccctgcaataatactacctggtagcaaaatcaaaccaccaactaaagatgtttgctttccgacaatttggatgtagttaggcaatacaaaactgataccaatattattaaattgcaataaaaagtaagctaacgcaccataaacaaacgctttttgcttaaatacggctagatctaacaatttcttggatgattttttagataatctaacaaataaccaaattaaaattgcagtcacaattaataaaatccacattaaaggattagcaaatccattactaatttgatttacgcctaatgtcaaagtaataaatgctatagctaaaacgataaatgatagccaatcaaaactatttttagtttgttcatgatacttaccgactacaaatagcccggcaacaaaaacaatgatcgcaaaaattgtaacaaaaccaaaaatccagcgccagttaagataaaaagtagtgataccgccaaatgctggtcctaaagtcggtgccatagctactactaagccggcgattcccatgtaaacgccccatttttcgcgaggcataacttcggttactaagttaaacatcaacggtgtacttaatcctgcacctagagctgaaatcagccgacctaacagtaaaataggaaaattaggtgctacagcactaattacgcttccaatcataaaaccaacgcaagcaacaataaacaattgccgcgcagtaaaacgttcattcaaatatgaagaacaaatcataataatcgcaatcgccaataaatatcctgttgtcgtccattgaattatatccaaaccgacaccaaattgcttcatcatcgtaggaaaagtgacgtttaaactagtttccgtcaaaattccgacaaatgacataaacgcagctgataatactgctaaaacatttttagtattctctttcacacaaaaatcctttccacaaaaaaagaaagagcaaaaaacctttgtttcctactctttctttaattagcacagctaattatattaatacgcatactatcaaatatgctgagtatatctaatattaaagacgcttagctaagtcgtcgtgtaagttttcgtaacctggcttgttaagtaaaccaaacatgttacgcttgtaagcttcaacacctggttggttgaatgggttaataccgttcaagtaacctgaaatagcaattgctaattcgaagaagtaaatcatgtaacctaaagtatgtgcactttggtctggaatgttaacagtcataactggaacaccaccatcggtgtgagccaaaacaacaccttcataagcacgatcgtttacgtagttcaagctcttaccttccaagaagttaagttggtcaaggttcttttcatcgcctgggatcttaacatcatgacgtggattttcaacacggataacagtttcaaataaattacgtaaaccttcttggatgtattgaccaagtgagtgaaggtcagtagtgaagttagcgcttgatgggtaaatacctttttgatccttaccttctgattcacccattaattgcttgcaccattcaccgaacattcttaaacttggttcatagttttcaacaatttcagtagtgtaacccttacggtaaaggatgttacgaagtgctgcgtattggtatggagttgcctttgacaaatcagtatcagtgtagtcagcacgtgcgtctgcagcacccttcatcaattcgtcaatgtcagcacctgaagcagcgattggaagtaaaccaacagctgaaagaacactgtaacgaccaccaacatcatcaggaactacaaattcttcgtaaccttctgcatcagcttcagtctttaaagcacccttttgacggtcagtagttgcataaattctcttagcagcttcttccttaccatacttcttgattaacttgtccttgaagattctgaaggctactgatggttcagtagtagtacctgacttagaaattacgttaacactgaagtccttgtcgcctaaccattcaatcaagtcataaaggtatgagcctgaaagtgagttaccacagaagacaacagttggcataccgttcttttccttgccatagaaattgctgttcaagaattcaattgcagcttgggcaccaaggtaagaaccaccgataccaatacaaatcaaaacttctgaatctgattgaatcttcttggctgccttcttaatgcgggcaaattcatccttgtcatagtcaactggcaaattaagccaaccacggaaatcgttacctgcaccagttccatcgcgaagttcagtattagcagcgttaaccatagcttgcatttcgcttaattcattttcatgaacaaattgtgttagtttactactatcaaatttaattaaactcataaatctgcttcctaactaaataaaatatttttcacaaacctattttaacaatcttgatttataaataccagtacattataagcgcattcaggcttttttgacaattttaaaaatcacataacccaaaattgctccacaagtattgaagaaaacatcatcaatatcgctaacccccgtcaccagcaaaaactgcagagtctcaattcccactgaaaacagcatccccatcagtaccgtccttaaaaacgttgctctttttgaaaaaacaatggggaaaaaaatgccaaacggcacaaagcacaagacattgccaaaagaattataaaagaaatccaaatgactgggagcatagactaatttccaagtttccttcatgaataccaagttaatatcactcaatggcctagagaaattaaaatcaagctgccacggaaagtaggtatttctaaaagttgtcagcatcaaaactaagattatgtaaaaagaaaagacccaaacgctagcttcagacctaattgatcttctgcggcgcaccaaaagaagccaaattaagcgcaatacagcaaaaattaaaaaataaaatattgttttatccagcgctaataaggttaatttaactaatgcaaagtggttaatattagttgcatactgtttagctaaaaaactataaagtgggcccaaaaatagcatactttgcctctttccaaaatattcattatagattatacctattttcacggctggaaaatcttaaaaaaaagataactcttagcaaattattgttttaaaagaggtgaaccattaaaattaaaagatgttaaaggagcattatatggaaaaaaagaaaattatcagttttattcaaacacgaacgggctttttaacccttttagttgtttgtttctggctgaaatatatttttgcagcttattttgatttcaatttaggcttgagcgacccgtatcaacatttcattatgtggctcagccccgtagggtccgccatcattttaatcagcttcggtttttatattcctaaaccgctgatctcttacatcacaatgttaattttagactttgccaatacggcattgctttttgcaaatattatctactatcgtcaattttcggactttttaacaattaaaacgatgtctaacgttggtaaagtttcgcagggtctaggtaaaagtaccgttgcccttctgcatccaacagatattattatctggattgatttgatcgttattgttactttactgatcattcataaaatcaaaattgatcaaagatcttacggcttatccaccccatttgcgattacctcagtaggcgcatttgtcctaactcttaacatttttttggcagaaacctctcgtccgcgcttattgcgcaacacttttgatcgctcctatgtcgttaaataccttggtattgacacctttactgcttatgattgcttcaagagtgcgcaaaatgttcaagtcactaaaaatgccaacgctgcggacttgaaccagattttaacttttaccaaaaaacaaaatgctgctccatcttcctcatattttggtattgagaaaaaacgcaatgtgattatcatccacttagaaagtttccagcaatttttaattaatcttaaggttaatggcaaagaagtgacgccgttcctaaattcactttatcaaaataaacatacgctcagttttaacaacttctaccaccaagttggtctaggtagaaccagtgacgcggaaaacatgctagaaactagtacttacggtattcccgacggatctttattcacttctttaggttcggaaaacacctttcaagctgcaccgcaaattttgcgtcaagatggctatacttccgctgtctttcacggcaacgtcggtagtttttggaatcgaaatgatgtttataaaaatatgggctataattatttctttgataaaaattactatagctcccaaagtaaagatgcaagcggctatgggttaaaagataagctgctttttgccgaaagcgttaaatatttagagcagatgcagcagcctttctatgctaagttcattacggtaaccaaccacattccgtttaacttagataaagaagacaaggaccctaactttaagactacaaacactgccgaccaaactatcaacaattactttgaaactgcccactacctagatgaggcattgcgtgaatttttccactacttaaagtcttctggtctttacaaaaactcaatggtagtcatttatggtgatcactatgggttaagtaattctgaaaatgaaaccttagcaccaattattggtgaaagctctgacacgtggaatacttacaataatgttcaaatgcagcgtgttccattcatgattcatgccaataatttgaaaggaaaaattaatcatgaaattgctggtgaaattgatgtcttgccaacactgatgcatttgctcggtattaacaataaaaactatgtccaattcggtagcgacatgctttcgcctaaaagacaaaattggatcgtctttcgtaatgggaccattgtcagctccagatatatcatagttggtgctaaaggaatcaaaggtaccgtttatgaccgagttagcggtaaacaaatcattaattttactcctcaagagaaaaaagaaatctctgagctagcacaaaaggccaaggcatcattagactattctgacttattaaacaaccacaatttgttacgcttctacaccccaactggctttgtccctgctgatccaacccaatttgattattccgtcaattatcaaaaaatgatcgctatcagaaatgaattagctggcaattccacctcgctttatagcagacatcgcggtacaactactaatctttaccgtactgatgccgctgaactaaaagatagaaaacaagaaattacccaagttcctgacagcgttaaaaatattaaagagaatacgaaaaacaaaaatagttcagaaaataccaataactaaaaagaacgcacagacctttcaaaaaaactgtgcgttcttttttagtttttagctacaaactgttcatagcccttgtcataaaaggtcacggtgaatgtggaacctttacctggtgcggaaaatacttctactttgccaccatgttgcttaatcaaagaagaaacaatcgcaagtcccaagcctgattcgccagttcccattcgagcacgcgatggatcagccttgaaaaagcgttcaaaaatatacttagtctgattcttgctcatgccaataccattatccttaaccgataattgtgttccatgctctatccgtttacccgaaataataattttgccatcatgagtgaattgaatcgcattttgaactaagttaaccattacctgggtaaaacggtcacgatctgcataaataggcaactgatcaggtgcctctacaaccagctcatcgttggctttagttgcattttgttttaattgcgacttcaaatcatgcagaataattgtggcattaaagttagtcttaaccagcataatttgattatttcgaatcttttcatagtccaaattttcattgactaaccgaattaatcgtttagtttcgcgctgcattaacgcgattgacttcggtttagaatcctctgggatagcatcgtattgcaagccctctagaatgccattaattgttgtcaatggcgtccgcatttcatgagcagcatcagccatgaattggtctcgtcgctcttcttgagccttaacctcttcgttcgactgcttcaaagcctgcaccattttattgaaattctcagccaattgatcaatttcatcgctatctttatgctcaatttgcacattaaagttacctgatgcaactttttgcgtagcacgtgataatcgcttaattcgtttagttgaataataagaaataataaagctcagcaacaatccaaccgctacagtaattaacaatgcacgcaacaaattgcgtttagccattaaaatcggtcgctcaacatgctttactctcgatcctatccaaacaatgccaacaagatttttgccattcatccatggaaccaaaacccccgtgtaggcatccttagttgaactaatcggtgaattttcattatgattattttgaattctaatctcttgcccattttttaaagtagtaaaaacttcttgtgaaagctgaattctagcctttgttttgggataaatctgctcatttttatcattaaaaatacgtaaatgagcatcatcaccacgaagaacatattctaattgattcaagaagttattgctaagcaatgcagtcccattttggctatcagcttccgccaagtttcccaaagaattagcatagctttccatccgctggtagttttgcgtataagcttgattacgcgcataaccaatctctgagtaaccaataatcgagatagttgtcacaataatgagtaagaaactcaacatattttggtaaattaatttcattatttgacctgcgaatcatcaaacttgtaaccgacgccccaaacagtttggatcaccttggcaccaaccttctctaatttctgtcgaagctttttaatatgagcatcaacagttctttcttcaccataatactcatagccccaaactagttctagtaattggtcacgagaaaagacttgtttaggcttttgtgccattgtatacagcaaatcaaattcttttggtgtcaaacccattaccggctgattatcaaataaaacttctcgtctattttttgaaatcttcaaatgatcggtcgtaatctcatagtcttgattatcttcttgagtatgagctggttcttcttccatcatcacgcggcgatgcaaagccttaatgcgggcaatcaaagcaattgggctaaatggcttagtgacatactcatcagctccgatacctagccccaacacttgatctgattcactgccacgagcagtaagcataataattggcactgtcggcgaaattgcccgtacctctttagctacttgaatcccatctttttttggcaaattcaaatctaacgtaatcagatcatacttatccgcgttctttttaaacatatcgacggcttcgacaccatcaacagcaatgtcttgttgccaaccttcttttttgaaaaacattcccatcatttcagctacggaagtgtcatcttcgaccattaatattctcaaactcattatcaatccctaaatccttttgttctcttatgcttcacttgatcaggatcgacatagtcatgtggcaattcatgtcgtttagacaaaaatgttttcaaacttttttcggtataaacaattggcaataagataaataaataaaatgttaacagccaaatgagaaaatagcgatcccaattcaaatagtgaatgattactcctaacagtgcttgaataaacccaaacaggatacaataccagcttgcccgtttctgagcaaacttaaaactatcctggttaacttgcgcaagataagataaatagccataaattcggttgggccttttggctggcgtaatcagccaaatcaaccctaccgccaccataactaagccacaagcgacatagatcacgatttctcactcctaattctgataaatttaaacggttattcctcacctggtgcagacataactattctcattttaccagtgaaagtgaaattcttcatctcatttggaataattaaattagttcccatcttcaaatcatatgacttgccatcagcttctaattttccttcgcctttgataacggaaactaacaggtatggatgatcctttaagccggtcttccaagtaccatcaaggtcaatttgccacaaataaaagtgtggtgaaagtggtggttcaaccaatgtcttaatttctgcatcttgatcttggctagtcttaacatctaacttaggatcaacatggggaacagtggtcacatcaattgacttttgcgtatgaagctcacgctttttaccatccttgcccacacgatcgtagtcatacaagcggtaagttacatcacttgactgttgagtttcaattactaagcatcccttagttaaagcatgaattgtacctgctggcacatagaagaaatcgcctgctttaaccggaacttttctgagcagcttatcccattcgcctttgtggatcatatcagctaattcttcacggctttttgcatgatgaccataaataatataagcacctggatcagcttgcattacataccaagactcagtcttaccagaatcattttctactttgcgagcataatcatcatccgggtgtacttgaactgataaattatcattagcatctaggaattttaccaataatggaaattccttggccttagggttgccaaacaattccggatgcttcaagtaaacatcccgcaatgacattcccttaagtggcccatctgttacagttgacgcgtcatccttgtaacctgaaataatccaagcttctccaacttttccttctggaatatcatagtgaaaaatatcatctaatttacgtccaccccaaatttttggcctaaagtatggggttaaaaataatggttccatttaaatcacctcaattaaagtataaactttaaggcagaataaatgaaacccttttcttagatatatgtatactatttgttttacatgtaaagctacttgttatacttacgaatacctgtagctaatctttgcatcccatccttgaccatcgtcaaaggacaagctagattaattcgaataaaatcatggccatttccacgataaacactaccagctgaaataatcagcccagtttcttggcgaatgaactctgctaattcctgtgaatcagtactgatcttttgcacatcgatccacatcaaatatgtcgcattgcccgaaatgatttgtacttcaggaatgtttttttcaataaaattctgcacatacgcaaaattttgctttaactgttttttcaaagcattaagccaatcatggccttgctcataagccgcaatcgttgctggaatcgccaataaattaggctcggctacttcatcactatttaaaccgcggttaaccatattgcgcaaattttcattaggaacaattgccgtagcagaatgaagagcagcaacattaaaagttttgcttggggacactagtgaaatcacactattttgtgcttcacctgttacagaaaaggctggcgtgtaatctggaccttgtctaaccaaatcaccatggatctcatccgatagtaatgttacatggtattggtgacaaagatccgcaattttttgtacttcttcactagtccaaacttttcctactggattatgtgggttacaaaaaatcatcaaagtcgttagcggctcagctaatttttgttccaagtctgcccagttgatcgaataacttttaccatcgaaagctaaatcactcgacaaaacatggcgcccattattcaaaatggaattataaaaaatattataaactggctcttgtactaaaacattatcaccaatatgtgaaatacggcgtacaattgatgaaatagcagggactactccagtagtaaaaatcatccaatttgtttgtggccgatgattatgttctgtttcataccaatcagcgacagcattaaaataatctgcttgtgggaactcataaccaaatgcacctaatgtcaatttttgttgcattgcctcgataatttcaggtgccgtcttaaagtccatatcggcaatccacattggtaattcatcagacttcacatcccactttactgaatcagtctttgacctatctggtgcattttcaaaatcatattgcatatatctcactaatcctttggtgtttggttcgtatcagaatgaacaatttttgtacctattttcggacaatcaagctcggttttagatggatctaccttatctggatcgataatcaaagtaccaatctcaggtaccgtaattttaccagaaattgggtttttaatactatcaatctttgtattaagctccacatctaaattagaaacatattcaaaagctaaatctgtatgaatcaaggaaccattcttaatctcaagctgatcaatgtagttcaagccctgatcactttcaattttacaattaattaacgtaatgttgttagtattccaagctaaatattcaccatcaataattgaatcgtaaatagtgacattattgcaattccaaaaagcatctttagagataaaagttgaattatgaacttcaatgttttctgcaccatcaaaaacataatttcccacaacggaaacgtgatcaagataaatattctggctatctttaccaaaataatcaccattaatttgagaattggtaatcttaatatcattacaagtccacattgtttcttctgcgttagcaaaatgaacattatctaaaataatatgaattgtccttctgaataatttaggtgcctgtaaagcactatttttaattgaaatattcttggtataccaaattccagaccgtgacatagtttcaaacgtggtattttcaactttcacattttcatcataccaaagtggatatttccatttaaaaattgaattctttaatctgatatttttagcttcttttaagggagattcaccactgccaaatgtaataccatcaaggattgcatcagttaatccataaagaattctttcacctgcaaaatatttatttttgtattccataattgtttccacctttttgttaatttaataatcattaattttaggacagtattcattatatgatttctttcatgcaatgtttaatacttatttttagtgataatgcataacaaaaatgcatagcagataaacgatttagcaaaacaaaaaaccgctctagaacaacatctagaacggttatctatggagatgaggggagctatctttacttttagttacttttaattacttctaagtactgaaattaagccattttgatgtttgttggttttagttaattttgaagttggatgcctttttggataccctggctaacaataaaattcagacttagaagctttgtcttagctcccaatacaaaaaagtcattctatgaaacttgattctagaatgacttttaatacaacaatacatatagtttaaatatatgttgttagaattcattgtctacaacttgccttgcaaaatcacatcattcaagaaactagaagatgagctatatccatgttcttttgcaatctctgtcaatttagttcttgcacttggcatcaaactaaaagtgtaaggtcttctcttttctcttttaatataattacttgattctttagaagatatttccttaccagagtcatcattaactctaggtgtttccttcaatacttctgcaaactttttgccttgatttgggttaaaactcatagaaaaaatcccccttaatcattactgtactatacctaatttcttggtacccaaaacaacatatcctggcgcttgtttaaaagtcgtcatataagtgatcaagcaatgaacctcacgccctgtgtaattttctgttgttggatcatattcttctagcaagagtaaatcacctacttgataattacgatcattttttctaatttcaaaatttttagagttatttacttgtgcttcaaaatagctcgggaaaatttttaccctatgttctttgatctcgtatacgccactcgatgtatatactttcattagcattacctcatattttatttatacattacatatacttagtttatatttaatgtatatttgctttatacattatttgtaatgggagactgtaaaatagtttgtgtaaggatgaatgattccttaaatttatttctttaaacattagaaaaaggagttcctttctcgtatgattggtttgaacaaaaaaacacatacagaaagaagaactccttcatgaatgattttaccaaagattttgctcaagctctattcaatccagacaaaataaatgatttattgcgcaaagagctacaacaggctgttaataacttgttagaagctgaattgactgcctttctgggctatgatccctatgccagaaatggctggaatactggcaactctagaaatggtgcttatttccgcaaagttgatacgcaatttggcccaattgaagtgcaagtgcctcgggatcgcaacggtcaatttcatcagcacacgctgcctgactacaagcagcactcggatatcttggaaagcatgattatcaagctttactccaagggcgtgaccaccagggaaatagccgatctaattgaaaagatgtatggcagccattacagtccagctcaggtatcaaatatttccaagcagatgattccaaaggttgaggcttaccacaaacgcaagctaagcgacaagtttttctgcgtctatttggatgcgacataccttcctttgcgccgagaaacgtttgagcgtgaagcagtatatattgccattggcattaaacctaatggacataaggaagtcattgactactgcattgctcctagtgagaacattgaagtctggacagagatgcttcaaaacatgaagtccagaggcttgaagcaagttgaactctttctttctgatggtgttgttggcatgaaaacagccttggccaggacttatcctaaagctcattttcaacgctgcctggttcatgtcatgcgcaatatctgtgctaaagtccgggtggatgaccgcgaaaagatcatgaacgaattcaagcagatacatcaacagacaagcaaaaaagaagctgcagctgtcttgcacaaattctatgccagatggaataaagcttatagcaatgtcatcaaaggtttgaaggaaattgagcccgatctgctggtcttctacaattatcccaaacaaatcagagcttcaatttattcaaccaatatgattgaatcctttaacaacgtcatcaagcgtaaagctaagcctaaggcagagtttccaactgaacagtcgcttgatgcttttattggcattcaggcaatgagctacaatgaccgttatttcaatcgaattcataaaggctttggtcaggttcaggacaccttagaatcctactttgattaaataaataattaaaaaatcaatttacgagaaagaactatttacacaaaagatttgacagtttctattcatatgctatgtataagttatttatgtttaacttatatttatattatatatcatatttacaatatttcaacaactatcgtttttatttttataagaattcaagtgtaaaattaaaaaagataaaattgctgttttctaacaccttctattttttaagctttatttgtaccataatgacatcatttgtatgttataatgatgtcatagcgtaaaggagtgattgttatgacatcatcaactacaatccgtcttgatgacgatttaaagagaaaaatgcaaaagattttagatgctgcaggcctttcaatgaatgcatactttgtaatggcagctaaacaactggttttacaaaaaaagttccttttgaaatcttgactgaaccagaaattcctaataaaacaaccgaaaaagcaatgcttctagctgatgccaaagatgagggcttggttacagatgattcgcctagttttactaatgtcgatgatttaatgaaatctttggatgagaactaatgtacactatcaaatacgagccacaatttaaaaaagactacaaaaagttcaaaaaagaacatccagagttaataaaagattttaagaatacagttattcagttaacccaaaaaggaaaagtcggaaaggactatgaccttcatccgttagataaacgtggtggtaattacagtggtcattttgattatcatttaagtgaaggaacggtcgatgttgtagtgatctacaagccacacaagaccaattcaataattagatttgtgagaatcggaaatcatggagacctatttgagggtaaagaaaaataaactatataaatacggatatatcagtatttttgatatatccgtattttgatatacgaattagaaatttagattttattctttttaaaactccgctcaccatgttgaaaaatcgataaaaacaatgctaaatgtagaaaaaagaaaaaatcatagtagtaagactttaaaaaggacggtagaactactttaagtactacaaattacaacaaaaattttataaacttctacttcattaagaaaaaatcctgtaatacagggctttttaagctaaaacgcaacttttacattttattaattagtgattcagtagttaaaatttctctatccttatactttacagcctcagcaatcgtcagtttttcaattgctctaatgtacttctccatgtaattaaagtctaaattttttgtattacttacaactggtaatcttacactatcacttcttattttggcttttgaaatggagtcatcccaactatattttttagataaagcttttctaacacttcctacaaaatattgttgaattagagggcttttatatcttgaatctttaaaatatagtgccaaattatgactatcattcgaacaaaaatctttttcttgataagttactaccatagtttttccaccaatgaaaacgcaattgccctcatcgatccattctttaggacaatttatgtattttaaaacagcattattgccttctgctgctgtcaagtatggcacattgccattttcaaggttagctacttgactcttcaatatactatgagtattaactacattaaatagatcaactattttaaattcttgaaatattggcttatatgctaatattttcttgtcttcatcagttagtccatagtcatttaatcctgtagcttttaaataggaatcaagctcggcgagccgttgctgttcaagctcggcgagccgttgctgttcaagctcggctatatattgttccatataattaaaatctatttcatctgcatcagttacaggtagcctcaccttagagtctctaaacacattatccacgtgtctaacaagaacagacagtaacaccttagacaatctactaaaaatggtattaaagtacaacgcaattttagtattaagtttaaatttgggaataattttccttacgaactgtcctgcataccaagaacgttctcgataaaagaaagtcatttgtaacagccccaaactaaacgtattaggttcattgtaggggacatcacatacaaagtctgttgtgctttcaatgccattattcaaagatgttcgggtaacatagtcatattcatttgtacttatattaggatttactaatttagacttgttgataccttttaccttttgtatttcaaataaatcacctaatttaaattccttatacttaaccattctgaccacctataacttgactaaccttccacgatagataatctgccacagtccttttaaagtcctcttctgcaggtgttgtgtcaatttttaaatgctggttataagtccaatcattgccttctagagtgattgtatctttaattactttatggtttcgttcagtatagtaattcgttttaggctttttatcactaacaattgcaactacttcttcataacgttctttggcatgatctgtatcacgtaaattaaccttctgaccagattttttacggttcattctagtatatccatcttcactaaaatctaagaaggttactaaatcatcttcttcatgtggtctagctactttaaatacataaatagcagtctgaacactagcttttccaccaaataaatcagttggcatatgaatagaggcaactaaagtattatttttaagaatattttttgtgtaaggcagcccgttgccactaccagcgttttcttgaataataattgccgcatagccttttgtcatttgtgacaatgcttcttgaacaaaaataaaaccttttccttctgcagagtatggaggatttagcaaaaacacatttgctggaaactgtgtgtaatttttatacagctcatgactattaccattaaccatattgctagatccatctcccattaggatcatgtttaaaacggctaaaatgtaaatattgcccagtatttctacacccagtaattgattttctttaatattttgaatcttgcactctagtttctgtttatcttgaattgtatttttagcatccttaaccataatatccattgcagacactaaaaatcctgcagatcccattgccaaatcccacacaaacgaatctttatttgtatgagctaacctagccatcatattcgttatgtatcttggtgttaaaaccacatcattttgacggtcattatcaattgatacccaatcatttagagagttcaaaattttaccagtaaaatctaaatgcaaatttgattcaagcaaaggaagtatatcattatagacttgcacatatatcttatgaatcaaactttcaccatttttaggttgccataaagcttgtttagtaaaaataggttgtaacaaagccataatcatgttaattttgctattttccgcttttcttgcatttaggaaatctgcaatatgatttaagataatttgtccatcattgtttctttcagttatatttccttttaattcagcaggctctaactgtgatactccttttgtctgtagccccgccatgattaaaccagtaaaaacatacaatttttcattagttgtcagtaggttttgaattgacttatcgtcgtacaaagcttgatgaattgattttatccttttttctaattcatcctcagtttctaatttaattttttcgagttcatggtcatttagatttagtttgtctaatatgccaaaaagggtatctatattgatttgcttaaacaaatcaaacgatgaatctagctgtctaatatgttttggaacaccagcattagccttagaaatataataagctttctgctcaggatcttttaaattgccttcagtatctaaagtagtaccattaattcccattatgataacttcatcacagtctgagttatctaagatcgcatttccataatgcagagcaccattagtagcatatgtagtaattgcactataattaggatcaccttttttatgtggattttttgcgttcggcttagaatctgaaccaaatttagtcacttgaacaatttgaccagccttgtctaatttttctaacttatttttgccacctttagcttcaatcattactggtactcttcgtgaatgattatcttctaataataattgaatatcaggataattgttgcctgcaccaccagatttagattcagcttgtcgcaaggctgatgtaatttcactatttatttctccagttttaccgtaatgcctaattcctagactatcaagttcactcttaaagtattcttctactttttcttcaattgatctaaccatttatcgcaccgccttttgttgcatgcagagcgtaaatgttgacaaatgaattatttgcccataattgatgtgatgtgatcattttattctcctgttcaattcttgcaatggttgattgaattgtatgtaactttttagctaattctgtttggtgttattcctgcgtttcttcaattaatttatctaatacccttttttatgggcaattccactagctatatgattttactttttttattatatagcatgtcaacaatagtttgccatactaaatggtttttaggatcttaggcatttgatctttatttaaaactaaatttgtgaatcctattgaaaagccgtcagaaacaacactaagtgtagaaaaaataaaaaatcatggtaatacgcgtggtgctagttaaattgttttagttaacaaaaaaagtccaatcttgttagactcgacttgtaaacatattaatagaaaagagtctgactagattgaactaccctaagcttaagcgtttttctcatcctaacacaagttagttttagttgtttaaatataatttatcgctgtttgtacaaactttatgccccagatgcattaaagcaaagacggaatatcaatcgatgtaaaatatctgacagttctattctggccttgcttatttggcaggctttattgggcgttgaatctcaaagaagattttgtgaaaagcttgttaatttatctcactctcgctttaatcgcagagcacgcatgcttttgccattgatctatttaattcgacatggccttaatgaggaagtagatctgtcaggcgacattttgattattgatagctttcctgtgccagtctgtcagccaattcgcaatcgtcgagccaagatctttcgcggctatgccgatattagctataaggcaacccaaaaaatctattattatggttttaaggttcacgctattgttagcgacgacggctacttgctagattatatcgtaaccaaggcctcagttcatgatgctaaggaaacagtagaactgattactaacgctcatcctgacaatcgttaccttttgggcgatgaaggatatttgggcaaaaacctgcatcaacgcttagagcaaatgggctatacgctttggacaccatatcgtaaaaacatgaagaatgctcaaaagcacaataagcactatttaatggcactcagaaggaccatcgagagtgatttttcgcttttgtcttactacaacgctgaaaataatcgagctagaagtttagcagattttcaagagagactcgaagttgccattttagcttataatatggcatattgtctagaacgatttaactagcaccacgcgtattatataagtttatttagatacgcttagcatggtcttgtgaatgagcattgttttgaccataatatgcattctcaccatgcttacgataatagtgcttatcaagcaagtattgtggtaaatgactattagcgtgggttaattctaatgtatggaagtcctcttctgctacgacttctaacacttttgcattatatactgccttagcaggtgtttctccccaggtaaatggtccgtgctgggaaactaaggtgcctggagttgcttcataatctaaatgacgctcttcaaaagtctttacgatagtaacacctgtattaccttcataatcttcttcaatttgttccttagttaaggcatctgcagcaggtatatcggtatagaaagtatctgcatgggttgtgttcattgctggaatatccattttagctgcggcaaaagatacagcccaaggtgaatgggtatggacaataccaccaattttagggaaatgattatacagatacgtatgagttggggtatctgaagatggatttcttgttccctccactacttcacccttcaagttaacaactaccatatcgtcaggagttaattcttcatatggaacacctgatgtcttaatgacaaatagacccttttcacgatcaattccagatacgttaccccaagtaaaggttactagtcctaacttaggcaattgcatattggcttcataaacttctttttttaaatcttctaacatgattgaaccactttctatctcactgaactgagttttttattagtttatacattttatctgtatcagtttcgcttaaaatctgatcatataatctacgattagtaataatgttaattaactgtgttagtgccttatcatgctcatggtgaaagccaggaacaagtacaatgacacactttattttttcttctatattattaacggaaattttaataggtctttttagaattccaatttcaatttccatttttcttgtatgcttagatggtgctgcgtgcgctaagaatgtatcagatgaaagcaacatatatgggccatatttatcaattaaactcaagatatcatcacaataaccagaggtaactatattctttttttctaactcttcagatagctccttaataataggattcaaatccgttccattcattagattgtcaatgatttttatactacttctattcagaagatccatcaaattgtgtttatttttatcacgtttaacagtatcttttgtaggatatagataattatctaaatcttttcttagattagaaatattctttatttgagcatttctttgaataatgctaatcaaattatctaaagtcttttctctattaatgaataactgagggaaatagtatcttaattgattctcaacttttacatgatcctcactgtccatcattgccttaacttggactacaggtaaatcaatattttttgtatttaatggagaggttgtaatgattaatttagctgtattagggatgcgtaaaattttatttaattcatcgatacttagtgacttagaaaatgtgattaatggatattgtttgtgcaaattagaataaagaatagcagatgaacttacgccactagtacatactaagagaacttccgattgcaagctatctctaatattatcgtttctatctaaaacatgagatatattatctgatagatcatcgtatgaaatgaagtacagactgatcaaagcaatttcattaattgaaataggtttagaaaacagcttagctaatggactacaagataattgtacaaacttaaccatttctgggaatttatggacaacatcagataaagcttcagaattaaagtcaaaattaaacttacttctaaaataactggcatataagtgattacttaaggctattacaaactttggagattgaatttttatgcctgaaatagaagcgtatctattaacaatgtcttgcgctacatctaaaattttgtctttaaaagattctgtaacgtaattaactgcgtcggcttgcgagcaaagaattaattcactaaaaaataaaatttcacttttaattccaatcccatatctttgcgtaaagtctgtaactgcagataaaacattaacggtactctcttgaatatcattatctgttatatctatgtcaacaatcatatttcccatagaaattcgccatattctaaatttaagaattctctttaatttagaaatagcgttttcggtaaatcgtgaggaaatatcttcctcgagaatttctatatcactttttacttttgaatcttcaataattggaaatggtaacttatctattttgtgtgctattaatccactattatgtttttgcagctcattgaaaataaaacgacttttctcttcttcagaactttttagtagatgaccatttgagtcaatatttagctttagttcagaataattttgtcgaatgtccttcaaatcatttattatcgtatttctagaaacatccatatcatcgattaattgattaatagttattggactattctgaataaaaaatttccagataatttccttcaatctgttttgtttattttcgttatgttgaaggttcttattttcattgatgttttgttgcttccaagcacttatagcttgtgcattgagtatatagcctaaatttctaacattttttataggggtaatatcttttgatgttaataaagcattagccttttttatccgataaaagattgttcgttgtgagacatcgaaatagttacataattcatctaacgtcacatatcttttttgctcagcaaaataattaattaaattgcgggtgtcaattgattccatctattatccatatcctaaaaaaatcgttaagacaatatctaaaatacttgccttaacgatttctaactctttaaactaacctttgataatttcttctacttgatcaataacgtcatctacgccaattcctgtcaataatggcaagccatttaaaactggaatcttgatttcatcattgtcatattgagtagtagtaatagcagcatctgcttcatctgccattgattgtacttgttgtacacttgtttgaactaatttgtaatcagtaccttcgttaaagcctctatcagttagctcttcgtttaacttattcatggctgctgtactagtaacaacaccagcgccacatgcgacaataatctttttcataattaaatcctcctaactttattaagcttttttagctgcttcagcttctttttcagccttaataatgcagtgacggttccacattactaagataccacaaactacaataccaataacataggcaagccacttattgtgtgccatttggaacaatatccatgggaaaggattagattcatagtcaattgatccaattaatgttgagttctttggaatagcaaagtgagcagctctagcagccttagtaaagaatggtgataagttagtaccaatccacaaaccaatgattacgttaattgcaccaataataaaggaacggaagaagtcgccgtgtgttactgccacaatcaatgggaacatgaagacaaatccaacaagtccaatggttggtaagaatttattgcctggtaaaatgaaggcaaataccaaagataatggaatcattaaggtagcacaagccaatacaactggactaccgatacctactgcagtatccataccgatgtagaattttctaccaccaaagcgtttttgagtcaatttttgaatattattagatactggtacaacaccttgtaataataatgcagccatttttggggtgataatcataacggctgacatagttacacccattaacaaaatcttacctattttgtctggccaatccatacccggaacaaagccatatgctaagaatccaactaacaaaccaattacgaaacctaaaagtgtaggttcaccccagttaccaaacttcttgttaaagtctttagcatccaagtgaatcttgttaacaccagggatcttatcaataatccaattaattactacggcaaatggtacaaaagaacctgcatatccatgaggaattgagattcctggtaatcctaagtacttttcagacaaaggtgcagttctgtcggcaattaccatgattacgaccatgtttacacttgctaagaaaagactaagcaaaatgtcatcagtcaaggcatatactaatgaacctgtaaaagcaaagtgccaaaagtcccaaatatcaatatcaatggttgatgttgttttggtaaacagcataatcatgttgataatgatacccaatggaatcattgtaacacctacaattgaaccatatgcaattgcagatgctgaaggccaaccaacatcaataactgacaaattgatatgcatgactttaatgatttcttgaactgctggattcataacatcagttaatattgtaacagttgcatttaatcctataaagccgattccgaccattaagccgcctcgaagtgctttagcaaaaggtaccttcaaacataacccaaaaatcaaaaagataattggaatcattactgttggtcccaagttgactatatactggataaaatcaactacatatttcatttaattccactcccttttagttaaagtacgatgctaatgcatcatataattcttttgaatctttatattccacaagctttgacattagttcttgttcttggaacatttccataagcttttgcaatagttgcacttgactatgtggttctttcatagctagcattgctacaaatctaacttcaacatcttttgatttatcagccatatttttgaaaaacactggctttttcaatgtagcaaatgcaataactggcttattcacatacttaacatcagtatgtgggattgctacgccaccttcaccgcttggcaaacctgttggaaaaatctcttctcgatctaaaacagcttgcttatagctttcagtcacaaaaccttgcttgaataactgatcagctaatgtagaaatagcatcggtagaatcactaacatctaattgtgcaaatactaaaccatcttttacaaaactcaatcttatttcacttcccacttcattcatcacattcatagtaaaataaaaccgcttttataaatagttcaattagccaaataaataactgcaagttctgcaccccttttgcatgcataacttgcagttttattgctcttgtgaaatttgtactattctattacacatttgcctttgcagttttaatggtaaattacaaaatctataaccattaattctgaatgctcctgtaaattaattaattcgaaattattatgaataaaatcagaaattgcaataatattgtccgcacctgttattatttcttccttttttattagctatttcaactaaatcaatctttaatatttcgccattaagcaggtatcgttcgactattttagattgatctactaaattacacattttgaaccagctaagatgatttatttcaaaatggccaataatatatgcatttacagccatttctattgaaaatacgtctttaatcattttgaagccttcttttaaatctatgccgtttatttgctaaatcttcttgcattgccaagattattacttgtcatagattaagtttttctttttgtagaaagtcattacatgctttaatagcagcaagaacaaaattagtcatttttcctccagagattttgttacctacaggctgataatctatttcaccagtctcatacaataaaatacgcgtggtgctagttaaattgttttagttaacaaaaaaagtccaatcttgttagactcgacttgtaaacatattaatagaaaagagtctaactagattgaactaccctaagcttaagcgtttttctcatcctaacacaagttaattttagtcgtttgaatacaatttgccgtttgatatacaaactttatgctcaaaattcattgaaacatcggcgaaacattgatcaatgcaaaatatctgatagttccattttggctttgcttatctggcaagctaccctaggcattgaatctcaaagaagattctgtgagcacttttctagtctgtctcactctcgctttaatcgtagagcacgcatgcttttgccattaatttatcaaatccgtcatgctcttaatgaagaagttgatttatcagatcgcattttaattatcgatagttttccagtaccattctgtcagccagttcgtaatcatcgtgcgaagatttttcgtggctatgccgaaaagctactaaacaaatctactattatggttttaaggttcacgctattgttagcggtgatggctacctgctagattatgtggtaaccaaggcttcaattcatgatgcaaaagaaacaatagaattaattgccaatgctcgacctaaaaaccattatcttttagctgatgaaggctatttaggtaaagaactgcatcaacaattgatgcagatgggatacttactttggacaccttatcgaaagaatatgaaaaatgctcgaaagcacaataaccaatatttaatggcactcagaagaacgattgagagcgacttttcgttattatcttactacaactctgagaacaaccgagcaagaagcttagcaggttttcaagaaagacttgaagttgcgattttggcttacaatattgcatattgcctagaacgatttaactagcaccacgcgtatggtaatatatgaaagtacaaaagaagaaacatcttgcatatgcgagaaaattaagacacacaaaaatcgctactctaagtccacaaatgagtaacgatttttttgtttcaccaaagtttaaaacaaaaaagctatatgcattggctaaggatagtgacgcttgtgatgttttcttgagttttgcttatggattttacgcctatggctattttgagcaaaaatcaacttttacattttattaattctaattgctaatatacttacttaatcttgacgcaatgcacctttaaccaatctgcagcaaaatacatattctcttctgaatcctcactattagtaatatataaaataaactttaatgcatcgtctttatcagcttttaagtgatatccattttcttgtaaaaaaaacgccgctgcataataggaagtccgtttatttccatcagcgaagatatgctttttagtaatcttctgtaagataaaagccgcttttaaccataatgttggatataattcacgtccaaataatatttgttgtggctgtttaacaacaacgtctaacccctctggatactgcacacctacagtacctttaccagctttttcaagcaaccgttgattcaaatggattaaatctgttttggttaaatagatcatttattctctaactctcgtgttaattctttattttcttcataaaattgatcaataaagttgtccaaattgggattaattgaatcaactattttaaacgtgatcttcttaccattaggatcatattctttttcaagaactgttccatcttctacatgaaacttagttaaatcttgcttggttaaacgtacactcaatgaattaccagctttaaaaactttagttgtatcttgtaacattttaatcacctgctttgccatttaattgttataacgcaataatacgatgttataacgtgaatgtcaatattttaactttttttattatatagcatgtcaacaatagtttgccatactaaatggtttttaggatcttaggcattgggtctatatttaaaactaaatttgtgaatcctattggaaagtcgtcagaaagggcactaagtctagaaaaaataaaaaatcatggtaatatgaaggtacaaaagaagaaacatcttgcatatgcgaaaaaattaagacacacaaaaatcgctactctaagtccacaaatgagtaacgattttttgtttcaccaaagtttagagcaaatatgtttaatgctttagctgtatgttatcacgaaatcaagtggctatcataatattgtctaaagtcctcggtactgaaagcacctgaagttatttgtacaatttcattaagcgctttttgctcactgcattttcgatatatcattagacgctttgttctaatcctaagcgaatgaagcatccattttatattctcatccaccagcttataatggctttcaattaaaagagcttttgcggctttttcatatactttctcctataaactgcttatcaagaacacggctaaattattgccaaggtgacttacgtaagagaaggtcaaatccttagtttcaagataaactaaagctaagacagacccacatagtgagtacaaaatggtatataaatcaatttgtggttcatgtaaaagtccaaaaattaatccattaatgagaacagcaataaacaatgttgattttttgcctggtttactaaaaaaccaattgaaaaaaatacctctaaaaataatttcttcaaaaagtggtccaattgcaatcagcattacattaataattggattaaactgttgctgatgtgcagctatgtttgcttgattagtggcttcccctttaatcaaaaatcctgctaaaatttgcaaaatacaaattactaaaaatccaagaaaagctaaactccaattttttagagtaaatcttggcattctagttttattgtaactagtaaagtgccaatcattcacctgattaagtcttctctggtaaattccgtaggtcaagctcagtaatgcaaccgttaatccaaatataaatataacggcaacccagcttaattgtttggctctaatcataaataatccttgaactaccgcataaataaggaaagttactatcatttgaccaacgccaattgctttatcaagaatcttttttttcatcttttaattcctttgatttttttatgtctaattttagatatcctatagacaagagaagaagataaattattattgaaataccaaagccagccgtcgcaaaattaacattggaatttattttcataaactacctctacttaacaaatttctcatcaaagccaaaatattttctgccattgtatttcttattgggattaggcttaatctcaattcgataagtacctttacgaccattgaaagctacaatttgcttttttcctgccgcaattttcttaatctcttcaggggtccaacgatgacctcgatatgttttcttaaaatgatattctttaccgtctttgtatgtaatcattacatagacatttttatctacaggtttagagttaattctaaagccccaaaatcttattttacgtcgtccttcttttaattcctgttctactaattttcccgttactgtaaagctctttccttgcttatcagtcccttcaaaactgatttcttcacctgccaacaagttagtaatttcttcttcactaaaaacatgttgtgcatattcctttttgaatttaatctctttatctaaaggcttatagattcctttaacgtgatcagtatcttcaggaaactctactttccaaccaactctggtaatctctttacccgtttttttacttttatacgtttgttcggctaaataagccgtatgttgttcttttttaccaaatttttcaatcgaataggtgatttgttttccttctaaagcttcttgttgctccacttcagtagtcgtatgtccatcaaaaatcgtaactggtgggtttactgtttcatttgtttgaataaagactccgctaaatcgttcaattgcttttaaatcaccagctaattttttaacttgtgtatcttgctttaataatgaggcattttctatcataactgctttatcatgttcaattgtcttttctgcaactgagtagaccatatcttgctttgtgggatcagccttaatttcatttaaaatatcctgcaatcgtttagtgattttacctgaagataaatacgtccctttagctaagcaagcaatcaatgcgccagttcctgttacttcaaaaacacctcttactacttttaattggggaatgacttttttattttctttaccaattgcttgtaatttactgattgtttgcattttagtcgcaccagtacccaagttccatttatccaagttattcaaaatgaaagttaaagtaggtttagttgggggcgtacttgtaccttgatatacttcagggctagcgttttgagcaaaatgtgtagccttattttctgattgcttttcttcatttaaatcattttcgttaaaaatcagcttatagtttagttccttaggaacattaatcgtactcttaaaatcaggatggtttgcaatatgggctttaacttgagtatatacatagtcctcagctaacattgctagatatgatttagcaactcgttcataaatatctcgaccacatttaccatatttgtcttcaactttttcaagtgattgtggtactaatttggtcggacgattggctccgtgatcctcactcttaattatgaattttttgcgtgggtctttatgacttaagagttttgaatcaattccaacgactgctgcaattttatctgcatatggtagtaactcgttaaaatcatcaatcgtaattgcgttgtcttctgttctcggataagaaacaatcttatcatcatacattttttgataagtctcagtaatttgttcagttgtatattccttttggaaaatcttacccaagtcagccaagttgactaacttaggcggctgggttcttttttcagttgtgctatcaataataatttgatcttgagaataattagttaaatcttgacctactaaatttttgtctgaaaaacgccaagtatcaccgtcttgatagtcacgcttaaatgtattgccgtttgcatccttataccttatttcatagaaaggctttttaacgtatgattttcttgctctgttttgctcatcaactaagcacgtaatatacgtctgcaagcgtcctattgaaagcgccttacctttattactataaccccgttctcttgccaactcagttgcaattcttgattcttctaatcctgttagaaaatcaaatctctgtcgtgattttccttttactaaaattccttgagcatcttgttcactaactgtagccttctcaggcttatgtaaggaatcaattacatagttagctgagtcatcacctttaaaacgaattcgccagacttcattttgccagtttaaataatctactatttcccaacctaatacatcaccttcaccagatgggtcattatcgcttgcaataataattacatcatgtccaggcaaattacttttaatattatcaatgtatctttgcttggacttaataacttgctttgaccaatttaaatcgagaggattccaaggaaagttatctaaattctgccaatccgcatatttagctgcaaggtttgggtcaaccatttcattaggcgcattgagttgtaataaatgtcctgcggcataaacaatatcatatggatttccttcaaattcgccactcattccacctaaataatccgcaaatttttctgcttgagactttttttcatttaaaataagtaatcttgtcacgttactattcctttctacaaaaaaagaatactcattatccaaaaatagattaatggaggtatttatattatatatcatttttgtgatatataaaagactagttaatttgtttaatgctttccagaatgactttattcatttgactaatcatctttctaaagtagttgtacaattgttgatcattgttacaattgaggtacttagagtagaaatagaagtcaattcccttgctctctagctttgctttttcttcctgataaatcttgtcactaattacataaccataattttttagataatcttggttaatgtaagtaataaagtcactagcttgatcatgctttagatttttaacatcaaaaccatatctaatcaatttctttttgatcacaatcaaggtatctgatttattaagttgtgctggttgaacgatatcaattacataataggaattggctaagtccttagcataaccttttttattaggtctaacaacgttgaacaatatatcttctaatcttgtgacttctttcataactgcctattatttctccttaccataatataagcatcttatttatatcatatattacatttatagtatacaatattgcactaactaaaaaatgaggcacaagattatattgttatttatatattaagcataaataacatatatgctaattataaacgcgcaaaaaaacagccagctttagatacaataactttaaagctggctgttttgacataaaattattttttagcgtttttacgaagaaacttaactaatctatgtatgtcttgatcgcttaatctacctatatgtttaacattagtatcttttttagataccgagtaacgtctataagtatcaatccatgaatgtttttttaaacctgtgttttcatattcttttatttcaaaataatgctttttgatttcttcagatttatttttaaactttgtcgttatatcaaagaaaaagaccttatcttcagtttcctgtaatatgaaaattggtcgtcttttaccacctgaaacctgaacaaaacgaacatatgctgtagcaatatttttactcatcttttgatatccattcttgcagtttctcagggctatccagattctccgttgcccaatccttggttaagttttgaatttctagttcatctttctctcgttcagttaaattggttgagaatggtaacccattctcagcaataagacgcttataaaacattgtgatagcaatagtaggtgttaaccccagtttttttagaacagcattaccttcttctaccacaccatcatcaatctgtacttgaattctttttttagtaattaaagccatagtagtgtacctctcatatcatttatactgatattgtactactaaatcaatggaattaaactatataagagtaataattagaaaattatttagtcaccacttgctcagtaagtttcgaaagcttgcacaattttttcattattactgcttttttgtataaaaaaagcagttagctttgaatactaactgcttcacaattattatattttatttcatatttttgatactttctaacgatctaattcctgttcacttttttgaatagcaatttctttggctttttcattagttaacgggctgtttactgtagcaacatgtggcttgctagtttgcacttctttatcatcaagcaatttagacttttcttgatttttttcaatttcattttgtaaattgtcggttaacttgctatagttgccatctgctgtccagcactgcgttttattaaatgcatcatccaaatttctaactgtatctactgtcatacttttttcgatttttcttagtgccgtcaattcggtcttaaaattagttccattagtctcattgtcagtaacttcttgctccattttttctttttgcacataccattgcgagtgttcaggagtatctaagaagttttccttgacaatttgacccaatttttcttgttccttttcgagtaacttatcggtactattagttagcgtcttagtagctgaaccaacatgcgtcaaaatttgcccttttaccccacttggtaactcattaaacttttgaccattgcttgtccaattagctatataatcaactgtttcttgcttaacatcaattccataatgagaacaataaagataacttgtaagctccgcctgcatctcttttaattctctaggcaagtccttttcttgtttttggctattatgtagctgtgcatgtcccaattcatgagcaagcactgatacattctccgttggagtgttgtatccatttaacacaatttcgttagtagccctgttaaagtatcctttagcattttgtggatccttatatttatcacgaatatctgcattaaatggatcataagtaatgactggcattttcatgtcattagctacacttcttaatccattctctaaagagtcaatctgtcctggattcttcatatcaaagtcttggtgacgattaggataaagttcaggatatttttccttaggcatattagtctgaggagcatcaaagactgttccaatcttataaaaagttttttgataagtttctatattacctgatttaattttttgtttttcgtctttagtagcattccttaaactagttaaattcttgttgccgtctttatcttgacgataaaaaactgtcgttttagtaggtacaaaaatcttgattcctttttcgcctttattgacgttataccccatctttttaaatttagcatatgaacctactgcggttgcacctggtcgttgcatatgaattaacattgcatttcgctcagagtaattatgaaatttactcataaagtcaagcatttcaacaactttttcaggtgatcgagtatagttctctacttctttaagtagtccactttttaaatcctcaacagtctgagtatgcttctttttccaagcttcacgatcaaacttactcttatcttttgttttgctattttcttttgattttgatggctgctgattagccttttcagaaatttgtctttcaacatcttttggcaaaagacttacatttgacgcagcaagcctgttatctctagttgcatcataaagttcattaaagtatttaatttgcttttctgttaattgactctcaagctttttaagattcgtactttctgtatgatctttactataattatctgaataggcattgtcgagagcctcattaactgctttgttattttgcaaataccattttgcagataatgagtcagatgtaaaaactttagcagcttctttaatcacttcttgcttttcttctttatcttgagtgttcattttgaaaactttaccaaagtacttttgataagattctaaagctttattttgtttatccagtccttcattaagtccttttttctcttcgtttgttaacggagctgcccagtcagaagtaacactagacttattccaattcacatcggctaaaactccactttctttttcactatcaatgactttttgagttaggagcttaattccatttcgattgatcatgtgccattgatatgttccttcagcatttggtgaaaaaagataatgatactctacatctgaattaaggtacttaccgtcattctttgatatatcattaatcatcgcagataagtcatgatagttttttctagcaggatcatcgattctttgtccattagaattatattcatccataagcttagtagcagctgtaggatcttctggaatatgattatcgttatagctccctgtttcaattaatttctttgcatcgtctaaggtacgatagttatcgagcaaattttgtcctgtaaaagttagcccaccatccatgtgaaagtactgagtagtaatagaaccatctagatttaaaattgaaacgtttgaacgtgttgacatattttttcctttctaatacaaaaaaagacgcttcataatgaagtgtctcgactacatataatatttagtttttactactatcaccttctttctagtgattctttacttttcttcttatctttctaatccttggtctctcattcttcggagggctatttctcttgctcttggatcaattttaaccgacaattttttagcactccccttttctttatttaattcgggaacttttttttgtttctccatttcagtagaagacatcaagtgcttactaaccaccatacctagcgacattgcgtctaatggggtctttatatactcgtgattaatggcaatagattctacacctctacccaaatctatttttctttttttagcattttcatttaaatactccacttggtctttactgtcttgaaaaacacctaatatagtattctctgggacatccataagttgatcttttaaatcaccactatttagattcatcaatgaagcaggaattgtaccatccttatcactatctctcagtaataccattaaatttttatctgaactttctatactgctatctaaatttaatttacggatacgctcaacattagaaaaatcctttaatataaaactgtctggctgcaacagcttagaagccgagtttaaagcttgcattttaaggaacgttgttttgtcattctttagcaagacagcattaggaattttattatttagaatatctgataaaatctgatttggttttcttctatcaaaacgtaatcctaataaatgtggaaaattctctttaccaaagtttacagataacaggcttaaagcatgattatctttaaaaacataatctattgttttgctagcaagtttttcattataaaatgtagcaaagttgttaatattatctatgtacaagtcattgatcatacttgcttctttttctcgcataatatgatatccatgaggtatatatttaacctgtttatctaaagtttgttctattttcttcactttttttctcctttacgttacaattacactaatagaagaagcaatttttaaattaaggttttgaattttcaattcgggtggctcactgccttgtcatatgactaaagaaagcgtagtgcattgcttttcaaaaagccctcattgagggcttttcttttacacttttctagaagttgtctctacataatttaaatagcctatttctactaaattccttttagttactaaagagctgcacatacggaaagcggtatgtgcttctttttttgcaaaaatttagcagttagtctttgactagctgctttttctcattattcatctttctaattcctgtcctcttctcaaataagccgcacgtttttctaattcttgctgtggtaatgttctggttgtatgcttagatttttgttttccttgttgcattttccgaaaagcttttaagatatcattccaatctttacctaatttttcactaggtttacagtatttaactttagaaaatttagattgaatctctttaacaaatctttttcctgcttcatcattatctacgcctaaagcaactgttttaagagtgcgcccttctttttgcaattgctctgcggtttttgttatataggagttaaacacctctttctttagtccatccattgaaacaaatcttgtatttttcattcctccttttactttcactttagataagtcaaagaagctaattgcatcaattggtgattcaaagaatctaatattttctggagtttttccactcatacctggcgaatcaaacgaaaaaccatatcccttagtagaatctttctctatcattttgagagttcctcttctaccatatttttgataattaattctggtcccttgttttgatatacccttaaccttttgtctgtctttaggatcaagccacaaaaaaagtgcattgccaaatttatcttgtgcaagcaccttatctttatgtaattgatctattgtctgactcgaaattccacgctgattatgtaaatatccccaaacacgattgattttgttttcggagtctaattgatttttatcaaacttgaaaggctcttttttgatctgataaactttaccatctcctgcaccgctagttaatactttatccattgccttaagaaatttttctttttcatttaaattgctatcagacaattcatataatgtagaaaaacttaatgcaccctttccatgaacctgtcttgaattccaataaaatgaattcttagatggtgtgataaccaatgaatcatgttccactcctttaaattcatcactacctgtttgtcgtaaagcaattcctgcacttcttgcatattcaacaatacttgcagaatttgctgctttaatttgttcttttgtaaaagcaagcattttaatttctcctatctttacccataaaaaaacaagtagtaaaactacttgtcaatctcccacctatacccgactaatatttttagtcaataattaagatgatcttattctaattcttgctcaacttcattttgtaatttttcaaactcacgtaagttctttttagtttctttatctgcgttaattttttcaaatactttttcttgatttgattttatttttcggatttgactttgattaatgaaaggtttttttaagtaattatgtcttttgaaagactttttaatctttagacgcagatgtggtgtatatgaatcatctgactttgacctttgttctgccgcatctttacgaatctcttttaatgcagattgaatgtagtcatttggatcaactttttctttaaagctaactctatgacgctgattatggttcgcttgtttatctattttccttaaatctgacaacaaagcattgccatttctggcataaataccttctttgccatacagttggttgattgcataatttttattttcacgtttacttttaccatataaagcttgtcggtcatcttgcattttccaaactaaatctttatatttctgaaaatcagaattatcctttagtaattcatcaaccaaatgattcgacattttttgttggcgtttatctaatttgttataaaaccattctcttcttgactcaggcaaaactctaacaaactgatttatttctgcctgaaaagttggctgttcaacttgactagtcaaattaatttgaatcgcttctctaattgcttgacgtttttgagatagctccttagtcatttcagctgaaccaatcagttcatttgcaaaaccacttttcatatgatcaattattttttgtggtcgcctacccttaggttgactaatcccttcacggtttataatttttcttcttgggtctttctcaactgttgcaatgtgaatatgaacattatcagtatttctatgaatggaagccacccagtacatctcatttaatggtggatccatttccttttgaaaaatactctgcatttttttagttgccttttgtagttcttcctcatttaatattccagttgtactagataaaatccccttcttttttaaaaaactattatcaaaactaacaacatcttgccacaagacagaattattctcttgtccttcatttaattgctcacgaatataatctaaatctttcaactgaacaatatctttgtcagagctaaatactccatctaaaactttttctttggttggatgaatttcactcagcttacttgcagcttgccctattctttccaattcagtttgttctttggtatttagtcccgtttcgttctttttctgatttaatgcatcaattcgtaccatatacccaagatacttatcaaattccttatcattcaaatcaaaaaaatttctcttttccattaacttttcagcagctgcttctcgttcagaatgttcttcactttttactctagtaaagttgttttcctgatttaattttcttacttgttttttaactcgacttaattcatctttttcttctgcagttaaaaattctttttcttctaatgcttcttttctggctatatatccaacgtaacgtccaaaagcttttcgtgaactcggcacagaaaattttgaagttaaaattatagctggtcgtcccaaaaattacctcctacaaataaaaattctatgaagcaagttgattaattattttgctctttcaattttaaaagccgtagaatcgcaatctcagcatcaaaacttactcaagttgtccgccattttcctccattctattattaattctttcttttacttttctctttgcagatttataaacttctgcatcaattccatttccgacaatttgcattccttgagtcatcaaaaactcacttaccatttctgttagaattgcaacttgttctttggtaaatcgctgttgttttctaatatcacttaaatcttttgtccacttagaatttttttcattttcttctgctaacttcataagatgatgaattacttcagcattattttttaaatcgtgttcctctttataatcttgaatccaatctaaatctgtatcagaaattgtcgctctaaaagttgtcttaatcattttttctggtcctcttaatcagcgtaagtttcttgtctttttttcaaagcattatcaatcttttgattaattttttgtaactcttccagttctttttctttttgaacacctaacatggcattgaagaataagaacttataaagttgaccattattatcaaagcaatgttcttttctaatctgcctaatttctttccattgcttatcgttgagtcgaaattgcaaaaagtgctgtcgtcccatttcttgccctctttctaaatttaatcatcttcttttgccgtgtcttctgacaaactatctaacaaatttaatgctcgttcggtgtcattaacatctccactaatgaaatactttgcaagaacattcagccctaataaattttcctgcagaagtttattctgcttctgaatcaataaactagtttgcgaatcttcattttgattttgaaaattaattggaatttgttcaatttgttctctcaaaaattgatttctggaaattttcttacttgaattttgatttaattgattaacaatccgatcaattctagccaagttttgttcgctgattccacggattaaaacttttaccataatttttctttcctctgatttctagtttctagttttccttctagtttctactctgaaatttgactaaaatctgcttcttttagttatctctagtaaagagcataagggaaatctgaccccacgccttttatcaaggtgtgctgggcttggttgtaccaagcgatttcgcatttttagaagtgatatcacttctgattaatttgacgtctgtatacttctaaattgttcgtcttttacctgacattacgtctttatacgtaatatttttttgtaatatccgaacaggacgtattcttacgtagctcattacgtccaagacgtaacattttttagctaaattttaaacctaattatcaaaatcaccgtccttaatgtctctaattgtgtcttcatatttagaaattgctttctgactttgtgtgatagctgctttgttttctgaaatatcattttccaaactactaatttgtgtttggtaattttctttttgactatcaccaactttttctaactttgcctttgcagaatctaaattattttgagaattttgaatcgtagcttgagcatccttaattgtattttgttctttactaatcttctttttattccaattaatcagatattgacgataatcaaggatatagttttgatagctcttagttactttgcttgaagtcagatcaaccttattctctttaatgaagaactcaatataattatttttagagaaatcttgcatgttaactcgcttattaactttttgtggcagaatatcaatctttaaatctccaaagccatttttgattccgctaacctcaattactaaaaaatgattattaattttctgtgatttgatcgcaagctcttctccatcttctccgccacgtgacatgtttactacccttgtagcatactttaagttgcttaagtctgaatcgtcactagtagacgttacgtctgtagagtccccaagataatactctagcaacatctttccgctttgcttattgtaaatagaatttgctaggtgaaatgatgaattgcctgtcactacattaacagtttgttcagtgtcaattgattttcctgtccaatagggactagcaacgattgcaataaaaattgcagctaccactccaatgaatgataaataaattttgcgatacttatgtttttggtgtcgcttcaattcatttttgtttttgctttgaatcattttttgcctttctaattgtcatccgaatgtacacgatagtttttgctatcatttaattcctgttttaattctgtaatctgctcctgttgatctcgaatttgtctttgactttctgaatctggattatcacgattaaagtaaactgttgccattaattgcgccgccgataataaaaacaacgccaatgcaattaatttcaaacgatgatttgacttttttaactttgttttttctgattgatatacaactcggctagacatttttaatctccttttatcacctgatctatcttttcaatgtttgttcctgaatatcgttctgcaattttcccatacttcaaatgtatgaaggtagggacttcagttaatttgtattcagaaatataatgtcgattcttaggttgattagtatttacaagttgaatattttttcttaataaatctcttttcataactgtgtaataaaaaatagatcgacaacttccacaatcatctcgataaaacaagactgttgattcattattggttttgatttttacaatatctttttggtttaagacatgacttacatgctggttgaaagcaaacactccaccaacaaataaaaaaatcattgctaaaactgttgcaatgatttttgttctatttaatttttttaattgcatttttagtcagcctctcgatcaacttgataacgccctaagtattcgatagaagtaatttgctctgccttagcatcataaattaattcataaccatcggttggcgttcccaaagttctaccctcttttgtcatctcgaaataaactttgacatatacaggaattttattactttccaaaatccctgcttttaaatcaagttcatcaatttgaccagtcatatctacgccactgtactgcaattccaattgcttattattctgaaacattgaatttgttttcaaaatatgctcgtttacaagatttgttttcttaatcttatctggaatctttagtttttcatcaccactatcatatgtataaagtaattcaaaaagtttgcgtacttgcttttttgcttttgcttgggcgacttcttgctcggctaattgttcttggttccctccttgtttcaaagctgtttttctttgtgagtttgcaatatttgagtcaagattctttaattccgtttgctttttggatagttcagcccttgcttgatcaacacgataatcaatagcctgctgttcattggtttcatatccaattactccgagttcaagtatgattccaagaactgcaccacctaaaagatattttttcttcattgttaattcccttctattgaaatttccttgaagctatttatcttttgagtcctcaagttatagtcaaattcccaaccattagtaatttcttttttgtttttgcttatggctacgtcaattaccgttacctttgtatgatttacatttgttaaattgccaaaataaatcattgtacttttattttttaagtagcccatggaatcaccataatacctaataaatttctctcctgcccgacctggtaagatttttttccaagcatcaaattcctttgcttgatttgacaattttctcttagtgtaaatgttaggtataacttttaaaaatctagcttgagcttctttttctgcgccaactacgtcaaacttttgtttataggcagaattttttatttgactatctctttcttgatctatctgcttattgactgtttgtatttcggatctaatttcatttaattcgtcatttttgggaattctacttaaagcgaatattcccaaaacaattacagcagccgtagctgtcattgtccaaacttttaaattagactcgcgctcctttatacgctgcttcattttatccttctttcttagtattaataccagttgtgttctttccagaacttttgtgcattacgccacgaaccatatctgtctttgacatatttatttgccgctcttgtttgattcttatgactataatctcctttaaggtattcacgttttaactgatagcgaccataaacacttggattagttggattggttgcgtcccatctacctccagattctcgttgaactatccaatcacgagcctcagattcagtttttgataagccatcatcttcttcagattctgcatcattgttcaaaccatctttaattaatttaattgggtctttccaagtaccatcatctttgtacgcagagagctctgcggtagcaaaatctttttcagttgcaccaatgtgaacgtgagtaataccatgtgcattacttgctaagtgacctattttatctcctactgaaactttgtcgcctacctctaccttgacgtatttcaaatctgcttcatcaaagccgaattcctgataaatgacattccaaccgtcggagccttctacccaaacgtacattcctagaccatcttgagtatgtccttgaaatgcaattttcttaacggttccaccatgaattgccaaaatatcttgtccaccatatggaacagtaccaaagtcaacaccatcatgaaagccacctgttcttgtagatgacttaccaaataattgctcacctgagattgtattacctggtccttttttaggaattgacttgaatggccacccccatttgccgcttattggcttacaatcttcctcagctgaattatctgagccactagacccatcacctttagctagtgatttattgcctttcaaggcatcatattttttagcctgagcttccataccagctctatattcgctttcagctgcagtataatatcctgcttttttcattgcatgtgcgtattcggcaactgttgcatcttttcctaatccagcttttttaaaaccattctgaactgttacagcccactcagttgcaaaatcacttaagttcttgtagtgaacataatttccaccttcactaccacgactttcacctttggtaccgatagtacttccttctgaataagtcataccaccaaagttatgatcatgttttgcaacggaactatcaccattgcctgtttcctgtcccatttgagcaaaaagcaatctagcactaattcctgttttttcatgcacagcgtctgctatatgcatcatagctgtctgcccatacttaggtgattcaatgacactaattcgtccttctactactcctccttgttctcctcccgtatcacattcatcatctgtagcagcccccattgctgcaattaaaattacaataaaatatataactgataaaacagctaaaattcctaataaaaaagcggctaatccagcccatctttttgtctgtcttaaccgcttaatatttgttatcattattgaccacctgcaaaaatttcaagttgtcgttcagatggtttcatcttgacttgatatctttctcttcctcccatcgtgacaattgcttgtcctatttgcaagtcaggaatgttactgtaatctgaactatttaaagcttcgcctaataggcttttaattttcttaagttgagatggatccatactcattagccatttgtattggcaaagctcgaatactacttttaaacttgatagttgagctgattctaccgaatcgggaaccatttcctctggcgattgtgtagcaaatataatacctgcattaaactttctcatttctcgttcgaagtttttaacataatcaaccgcaaaaatattttcataatttatgatgttatgacattcatccaggaacacatcaaaatactgcacatcttgacgtgtgattttccctgcctttaacagcgcattctgttttctaccatttatcaatgcatgactccaaatcaagcttagagccatatataattgcgcctgataaacattttgattcattgttgaaatagcagaagaatcaaatagtagaagcttagtatctgtcaaatctctcattgtagaataaccatcaaataattgaccgtaattctcaatcattgattccaatgctaccttgattttttcataagttcttattctttcagcagtaaattgatgttgttgatagtacattggcgtagccaatttttttagccaatttaaaaactgactaaaagtcgggtatttttcactatctaaattagtaatttttatatttcctttattttgttgaaaatttctaggtaataatcccatgtctacataaaatccacgtaacaatgaatcaaattcttgcatttcaatatttacaaaggatcccttattaatcatttggaatagaatatctaccttagaaatatgttggtaaaaacttgctagctcatcaaccttacctgtattttcatctacagtagttgccattacttcaagtggattaatcataccttctgatccatccaagctaaccacggttccaccataatgcttaattaaaggaatatattccttagtcttatcaattccacgaaagtacatatttctagcaattgtaccttcaaccaacatcttcattaaagttgatttaccagcacccatcttacccaagatcatcatattaaacgatcttctgatattagttgatctaaattgatcaaaataaaaggctcccccagttgaagtacgacctaaccagactcctctagggtcctttaagctttgagctgaaaatgggtcaccagctccaaccgttaaggctggaattggttgttctggcaatgctgctaaatccttttcttgctctgtgattggtaatgccattgatttaaactgtttatcttgcataaacatataaacagcaacgttataaccctcgcctcgaagcttgccacgaagattagaaactgattgatctaatgcttcaatcgttggagcatatacaaagattctggttagcattaatttgggaatttcgccaccttgacttaattccaatgcatatttttccaatgattgcatatctttttgtgcatttaaagcatcagtggcttttctagcattaacttgccggtcagctaattcttcaattgatctattcaattgccgcttaatttcatagcccgaatcagttttaacgtcaattgtagttaatgttgaatcatttaatgacacttgagtaagccagagcaaaagcggatcattaggataatggattacagataaacaagcagcatatccatcacttgcaattgcataattatctgcaaaagtaataccgccctgcggttgtacttctgctagaaacttagtattgtaaccattttttagtaattctctttgctttttcaagctggtaacttgtcttggatttagctttacagttacctttttcttcttgtgtctctttgttttcaataaactagaaattctcattttttctcccttacttactattcaagttgttttctctaaagagtactttaaccgtttcttcatagtccaatggtctcaagcccattaacccttgatcagcaaattgagcggttctagtgttaactctaatatcgtgcaaatcttctccaaaaatcataatgtaaaactgcacatcagagtaatcttctgtatttcttgacagcattactgattgcaacaacatttcattaactaatcgtaaacgcattttttcatatctggttttgggtgaacgaatcccattctttaaatggcgaaaatactgttgttgttcactagtatcaattctcgtcgacatgactacaattttataatcgttgctataaatccgattaaatgtagtaaatgaatctaggtatttacttctggtttcatcatcaagtgaatataaatctgtcgaatgtacacgcaaatagcgtgcttgggtgccatctactaaatcaagtatcccgtcttttgagcagttactatagcccaagtattcaactattgattgatctcttgcatcttgtcttgatcctttatctaagccaaaagctctaaacaagctaggagctttgctcctactgtttctactttttctttttgttcgcattattttctccttctaaaaataatggataatatctgctttggtcttgtcgcataatgcttaacaaaacacgataatttctaatctttggcgctagaggggttcgcattaccagcagaattcctactacaactccaaaacctgtcattactaattgccaagtcggttgtaaattaaatagaaaagaaatttgttgtcctgccatacccccaatgaaaagagcaaaaacatcaaacatatctaggaaaaagatttggatagatacattagttgacttaggaatcattattttttgatatttatccatgcactaatcctttcttctgctatctccatgacctaatttgccaatgttggtagaacttggtgatttagtttcagtagagttttcaacttgctgattgattgtggtcttatcatgcttaatttcagtcaccgtgttagtattgccttgagtttcaacggttctattagtgtttgaaggtacgctgctcttcatagcatccttcacactactcattccttgattgcctacatcatgagtagatacttcagttctgccagcctttctttcaatatctacatggttggtaccagcagtttcagttactttactatgactgtcttgtcccttaaagtctgaaacattgcttaagtgtctaccgccttcaccaactggttttggcggtgtggtttgttgatttgaacgttgttgacttgccaactcactagtggatttttgagtatctctcaagcttggtaattcatcgaccgcattactacttgttggtgagcttgaagagctatttgcttcaccacgctttgaacctgaaccagtaacagaagcactgttagttctaggatcatttgctgtttcttttttaccagtctttgaaccattagttgcttcactaactgtggtatttggaatttttgcatcattaccaattgtcttagctccacctgttgacttaatagagccgtcagttgaactttccttagcagcatttgatttaggcttgctatcatcggtcttaatgccttggttttgaatattatcaggtttaactgatgtattcttaccttggtcatttacatttttagctgaatcaacattgcttgttgcaactgtttctttcttgccatcatagtttggatttcctacaaatgaagtatcacgtccaatacctgttggttctgcactgccaccattcttttcagctctgttttgcatgtatggattatgatgtaaagtgttgtactgattatcagttaaaccaccatttctcatcattctagcggcttcatcttgtacagtttcagatacagcgccagaatttactgccctgttccaatcaactgcactgccaccattctgcttaaagtcgttatgagctgaacgaaaggctcttcttgcataactgccagcttgttttgcttcactattgcttgctccattttctttagcaatagccttagtagagctaccagcttgccaagcttgagcttcaccaatcgctgcccctgctaacttaccagaacctctggcaactccaacagcgccttcagctaaatttttacctttaccagcaatatattcagttgctgcaattcctccagcaactttactccagccttgcttaagtccagtatccaaaccaaagaatttttgaaccttgcttgaaccttcccaaagtgcccaagttaaagcaatcattccaactgcatatagataaggattatcatgaatctttcctgcatctgatgaactcatccacacagctacaattctatagaacgctaattcaaagccttggaatgcaattaacaacgctgaactaaaaatatcttgtaccgcagctttagtacgctttccagtttctaaatcagtggagaaaataatgattgataatacttgcataattgccaattccaagaatgctcttactgaaacaaagcaaactagtaagaaggcaactgtcattgaaaataaggcaactacaactgggaagaattgtactgaatatcgttcatacccaccgttaaaaattttgaaaaaggcagtattgctttgacttactttggttgcataatatcctgaatatgcttttccctttacatttgatttcgtaccaacgcctgtaggagctaatttataacgcaaattgtcaggatcccatgctggtttttccttagacttatttgctttattacttaatttctcagctaaatcagctgaaatagtagttgataaatcgcctgatgttgcagtatcaaaatcagacttgttcatagcaaatgaaccatagtgaacatctttttgtctctggtctttaatttcaccatttttatctttagaaacaccttcccatttggtattagtatccccattattgattttgaagccactaaaattattagctatgattgctaataggtcattagaattggcttgtactacctgatatggcaagcttgacgtccctttatcattatcagcctgtacaaagcctttatatacacctgtagactgatcaaccacccaatttgtaattggctgaatatttccgattaagaacgctgaaattgctaattgccaaacgacattttttaattgaggagctttacttgaggtaccaattttaattccgatccaagttaaggttaaaatcatcaaccctgcagcaattcccattaccccattaattaaattagtatttaatcctgtggattttaagattcctgagaaatccaaactatctgttgctagttcacttgcccaattggcaaatccataaaagatcttaactatgccccattttgtctgattcaaaatacgtcccaaaaaatcatcataatgtaaataaggtgccgcattttgtagagcttcagttactttttgtaatttggctggatcataatcacctgaattggttgatttttgccaccaatctaccaaactactaaaaatatcaagatacttaggattgatgaaactagttaaatagaataaccaatttgtcattaatttttcctttctttaaacaaaaagataagtagtccttatcgctacttatcttgataatattcattaaagctttggctaaattcctgtgttaactcattcttttccttgttcttatcttctaattttttatctttatagatgatattaacaaaagctattgaacttggtttttgtccttcaggcacatcttttaattttatagcctcgttcaatattgcttgttttgttccatcactaatatcaccatcatgttccgttaaccagttcgtgataaatggtggaatctgattttcttcttcctttaaagacttcttcatttcttgttcttctttagcatctttagtagttgcttgaacatttgcgtcactttgacgatattggttatacgcctgcaaagccaaattttcttcttctactactgcatttccatcttcatcttgtttggtaacttgttcagtccaagttaaccatttgctccaatcgatttctaatgcttttaaattaatattggcgtgtgcatcaatcttttcaactaaatctggattagttttaggattaaagtcatcagttaagaatgtatgtgcaaacggcattaatgtttttcctgtgttaaaaataggatgtgaaactaccgcccagccccatttattcattcttgttaaaggtctcaaaactaatctttcaccgccagctaaatgttctaatcgttctggtagtatcaacggtactttatctacgctaacactaacatttttggctaaaccattttgatctttagaaatattgcttgtctcaatcgttttattgccacaagcttctgaaaattctttgttagtagctgaatcagtagacataatcaaacatttattctgacaattttctttaataacttgtccgtcttctttgccatacttactgtagagctgggcataagactggataactaaagtaaatagaatattacgacctgctgaaactgtcataatccgatccatattctgcagcggaatcatactaccaaactcatcaaaaatacattgtactcgtctaattgtctttccaccttgaaccagccgacactgacgtgataattctgtatataattgattaacaaaaattgtagctagcaagttgtttgaagcatctgaatctggaattttcataaagactgcaattggcttatcactataatgcatcttaaagttttccatcttaatttcaggttttcctacctgacttacttcaacctttttaactttaggattaatctttaacttaaaagtattcttcaaacgcttatgtcctgcaatagcttcaatttcaacaaagcttcctgtttttagattgacatcaaagttgttttcaacaaatcctttttgactaacacgaatctcattcgttttcagttttttattatgattatctctaaaattgattttaattaactcaccatatagtcgttgatcaagcaattgaaactccaaatattttggaaaaccaattgatttcatttctagtgtgttcatactggtcatgcgtgagtttttcggtaaagtgaaaatatctagtttctgtacaacagttgaaaaaattgaacctcttgccttatcatctgagaaatttgtggaaccgaattcttttttagcaatagatccctgttccaaatgcttaaagtattcacttaaaacgttgtgttgagtatatggatctgatggattagtataatctatctgtcctaactgattaactaaatcagcgatatttacaaaagtaatatattctggatgggcttttttatctctaaagtttttaggattcatgcaatactcaatcaaagcaataatcataccattaacagctgattgtgcgtcgtcattaacccacttgttttgacctgcttgtttatcaaaataaagcgagtaggtaattgagttaactaattgcattgctccttcaacatcaccctgctcccagcttctaatgattaactgtagcggattaaatgcgattcctttgtttgggtcatctaaatttaattcataaacatcatagccacgcttcctcaacgtatttacagaagcaacatacagttctcctttaggatcattcacgactagtgacgattgtttttcagccctacttactaggtcgatttgttctaatatagtagtttcacctttaccagaccgtgaagtaccaacaatcaaattatgaactgtacttgtatcaatgaaataatagccatgtttagtaataaatggaaatttttgggttaatcctaatctattaatgtgagcaatgggaaacccaccaaaacctttaaagctaggctttttaggatctaaccctggttgactatgatcaggcacttttacataggtgtcttctaattccttaaccgtagtaaaacgggcatttcccttttgcccatgagcgactttttgactttcaaagtgaaatttttgacttaacaatccaccaataattacgctagcagcaaatacctctaaaatttccatgggcttcaactgtgtcttaaagaaattcaagccagctaatcccactttatctaaatcgagaccattcgtgaataagttatagtttttacttttagtttgtaacatgacattatggaatgctcctaataaccacattattactagaaagataaaaattcctataaccaacgttgttatcagcttcgtataattaaaattaatattgctagactgcttgttttcatttttgggacgatgtaattgtctttcaacttgatacaagcccttttttacaagattcttttccttgtttctagcattttttagatttattcgtgatcttctttttttagtacgcatatctagctaaccacccatcttgccaatcagcaatatcatagaaagccaatgcgacagcttttttagctgagttggaaatttctgttcgctgatcatcagttaaacttagccaaatatcccttgtctgagctttgtcttcattagcaatggcactgtacaaactagcaattggatttgaatagattgtagcaatcttctttaaatttcttgcgtcaccttgccctaataaaccatctagcatatctctcttttgtgcccaagtcttagtttcacgatattgttttaaaatagcttgtgacctagttaaataagttggagtagatttagtctttgatttagcattaggttttttatttttagcaatatcttcattagctgattttttatcagattgcttactacttgattgcttgtttttcttgacatgcgagtttgaacttgatcgttcaattgaagctttttgttcattattagaatggttattagtataagcccatgtaccacccaaagccgcagctgcaaggcaaactaatgagataatttcagatttatagtgacgtttcttaggactgttatcctcggtttctggctttaactctgaatcttcttcatttgattcagaatcaattggtgcatcatttttcttagtatcatctaagtctactacttcaccatcaacatgtggcacaggcactaaagcattctttccatcattatttaaagtaatttttacgttaggattttctaaattattttgagtaattgctgcagcaatcgcttttgcaaattcctcaggcaactttgccatattttcttgttgcaattttgctaaagactcattctgctcaattgctttttgctttaaatcaagttcacgttctttgcgagcagcttctgcttctcgctgacgcttttcctcagccttttcttgatcaagttgcttttgttgatttatttgttctttagctaatcgaactttttcttgaaccttctttaaattgtcttcaaataaatcattattcttgtcatagttatttctaactgcatgatcaaaatcattactaatggttgttctactatcatctaactcagaatttcgtttttgtacttcttcatcacgcgcaacacgttctactttagctttatcagactttaattgctcatcaatttgttcattagcattacgagttttaagttcttcttgatcattaaaattttttagagctaaatttcgtttctcctctaattgcttcttatactcagctaatgctgcttcatcattagttttcaattctaatgccttattttcttttaacttgctcaagtcagactgattattttgcttctgttgagttgctttaactactagctgttggatctgtgccgctgttctgccttcaacaattttatctagtgactctttagtaaccctgttatatgcttcctttaatctatctacaattgcagcctttgatttcgctaaaccttcatcatatacacgttgaatatcttgcattgaataatctcttaacgcctgatcgattttatcattcaacgcttgatcatattgatctttaggattatccaaatagcctaaatcatgacgaatattatttagagcaaattgatttttatcatatcctcttggcaaacggtcaagaatatcattggcatcggtatatttgccatagctaattacttcactgcgactagtttctgtttcagttgtttgacctgcttgaattggtgaagcaccaaccttttcaggtaattgtgtaggaacattattcaaactaggattggctgcggcattactatttgattcttctgttggactgttatcctcagtctcatcatttacatcattttcagtaggtatttcatcacgcacttcatcatctgaatctagaatttgattactattaaacatgaacccattgtcttcatttaagtcatcttcatcatcattcaaactaggttcaagttcattaaagatttgatcctttagcgttgttactgtttcttcttgatcacgagttaaattttcattctctaaatcacgatcaatcaagtttaaaatacccccgtcttgatcctcaggtaaaatttgtgcttcaaagctgctttcttcacgatcctcatcttcatcatcaaagatagtaaatgtaacattagaatcagcttcttctaagctcttggcatagtccttaactgcatcatctgcagttttaatgtctaactcaggcgattttctacttaatttatgcttaaattgaaaatattttttcgccccttttggtaccttatcaaaggtaactaatagcataatcttctctccttctttaacgcccaccatcaacccagtaagttaaacttacttcaccttacttacaaaactaactatctagcattccaaccaaacatatttgcgaatgatggtactaaacttgcagctaaagcaacaatggcaacacctaccagtgcatacatcaataattgctttgcattttgcgacattctgttaccaaaagcgaaaagaataccagccaagataataacaacaatgaacagacctttggcgatactcttcaggttcttttcggtactaccagtagccttattaatattgctccaaacattaagtaaaactggatgttcgtttaaaaaagcctgagtaccgattaagccgctccaaaataagtaggtcaatttggtataaacagctaaaaacattgttaatcctccttgtataaaaaaagcatttagttagctaaactaaatacttttacttgtcccattaaaatcacttgtaggcttattatcatcttttgatgacgtaaccttatcatttaaagtcttatcaggttcagcaatctgcaatttttctaactgttctgataattcttttttacctgcgacttctaaaactgcatctttatatgcgcttttagtgcctgagatcaagtcttgtacaaactcaaccataattttttcttcccaagccttttgtgttaagccttgggaattatgtagcttgcgtaaaatggacttgtcttgtttgctaagaaccatttttcctccttaactattgcccaccatctcacccgaaagaaaaagaaggattagactttctcaccatttcatctaatcctttatacgttattcgtctttgttacctggtaatgtttcagtttcacgcttgttgtctttatcagtgtttttattcttgtccccatctcctgttgggtcaacatcttcactggtatagtcgcctgaaacctcgatcttcttttctgcagaagcttttggagtctttggagatacatgagtgatattacttggtaagtcttcattgttgaacaagaagtgtgcttgatttggtacttcaatttgtccattatccttgttcaggtagtcaagcaatttaggagtattgattaaagtagtatcaatgaacatcttcaagtgcttaccatgccatttaccaggctcggttgctacccacgaaatcttaccagtcttattattaacgtctaatttaccttgatcagtaatttcttttgctttaccagcactatctttgtcgtcatagtcataaaccttaacgctcttaatgttttgaacgtctgcttcgatagcatccttaattgcaagagaatcaacattcacattatctggtacagtagcttctacgcggtaagtatatttcttgccaaagtctacgtctttaagtgacttagaatcacctaatccatcttctgaaacaaacttttcatccttgggattagtaaatggaatattagtagttacttggttagaatctgcactaccactatcttgaattactttagattcgttgtaaattacagcttgatctttatgttttggatctgcgtgatcctttaagctttcaccgcgctttacagttgcatcaaaggtaatcttgtaagtttcattgtagaagtcatccattgccaaagcatcagattttgcaattactgataagttattacctgaagataaagttactgtgaaattgtaagtaacatcttgatttgcacggttataaactctaattgagcttgtatcaatattcagaatattatctaaattatcggtgattctatattctgtatatttcaaacgcttttcaacgtatggtacagagtgtgtaatttgatagtgatattgttcataacgattatcaagcatatcatgtgttactgacttaataccaccaacttcatctggagtattagttccctcatccttatctgagacatacttattaggattcattggcttatctcttacgataggtttatcgaacatatttagataagcatggttaaacgtaccattccagatactatttgaaatagaaaccttatccttatcagtcattccagcatcaggatcatatttaccttggttcaattgccaattatcagtatctgcttcaatttctgtttggttttcagctgcatgttttcctgttgtagtaccaaaaacccaatacatattaatatggtctgtgtttgacattgttgctgtatatgcagccttccaatctgaggatcttacagtacctgaaccatcaggtaaagcggtatggtgttgattggcatctgaaaagatgtaattattgcctaaagtatttttataacttaaccaagtatttccatcattttgtccatctccccaaataacctgatcaattttgccgtaggtagagctatcatatcctacccattgattaccgtcaatatcacgaacagtttggtttaggtttaattttaacggcttaccagtgtcatgatcaataaaatctatccgataagcaacagctccttgaccaggagtaaaaatttcaaaattatctactccaaaggcaattgttggattttttagaggtactttttcatgttttccatcagatgtatcttgccatttatatgactgaatattccaatctgttgcggtgattttaacatcaatagttttcccactattagggtcaataccaacatttgagtaataaaccccaattttaccagctaattttttatttcccataacggaaaatgcgtaccaagagtgatgaaacccttcagtatttgtactagaagtagcccaatcttgtgaagcaccaccaaaggcatggattttggttacaccctgagtaattctaggaataaaagcatatgttcctgccattttggttccaacagcattttgtcctttaggcaaattgaccatttcggcgttatcagcatgtacagtatctgatccagtagctagatatgtgcccagcccaaagctcgttgccatcaatgcaattgcagcaaagctgactactttatttttctttgttagagaaatcatataatttcctttcttttgagtaacaaaaaaagaagagccacttttttatactcttctttagacttaattattaaattagattatttagttagcattattccaagcactaatccattcaggacttgtaccatcaaccgtgaagaatgaaattcctactgcgcttccatcggttgcttgtttatcgtagtaataatgtacacttaatgcaccataagctttatattctttccaaccataaatcattttggattggaaatcatctgactcttttaataccttaaagattgcatcagcagcttgttctggagttcgtccattatgtgtaatatctccacccattagtaaagctttatgattttcaccatatgcagttggatcaacatatccaatagcttgattcaaacccttagcagctaaattaggcaaaaaggttttaatatcattagtattctgactaattttaaaactaaacctgttataagccgcagtaccaggaacttgagcttgttgagctaggttagttagttctacattagttttaaaagctgtatagccctttgattcacggtacttttgaatgtcttgccataaacgcttttctagacgctgtaattcgttatcactaaagtaaacatgcttataaccatatttctttctgttagcatcttccttagccgtcattggtccatagaatgttgaccgccatctagtacttaataaactactattatcgcctacaatgtttgatttatttggatcaccaacatattcagaatcattagtatttactccagatgacttcgatgaagcagtactggatgaagaacctgtttttgaagtagttgatgatgtacttgtttttgcatgtacactattacttgttggaaattctcccttagtactggattttacaaatccattattagtagcggaactggtattataacttacagttgaacttgtattagtagaagcaaactttactacgaaattagcagtacgaacatatttgttcttgccaatcttgtaatatttcttgcccttaatcgttttcctaccaaggatttttacaagtttgcctttctttaatactttcttaccaacacgtttaccctttgcattataaatataagcattctttgtcaacttctttttataggttgctgcttgtacaacggttggggtattttcaacattattattcactaatgccacagagctaacagataaaacagctgctgcacttaagctaaccaataatcttttcttcatttctagtatcctccaatatataatacgtggaaaatttattttcttttttctacctgtattatataccgtttttatgacaaaagcagcagctaattacttagtaattttagtaattaaccctttaatcttattcttaaattcatcattagtcttatacaaataagtaccaattccaccagccattgcaactaaacttgcaataatccagcctgcatgttgcaagataaagtgacctgttcttggcaagaatccatttttacctgtaatagggttatttgatcctggattgtttgttcctggattatttggattattaggattctctgtgctattcgtaggattcttaggattgttgacgttgcttggtgacttcttatctgcttgtggtggaatgacattaactgtattagacttaacgtctttgccatttactgtcatatcagcagtgtttggtacttcaccattaaccttagaatccttctttaacttagcagtgatgttagctgtaaatttcttaccgcccatcttgcctactaaatcagccttaggcttccatgagaacttttcagtattcttatcaagcgtaagttcaccttggctagttacgtcattaccatcagcatcagtaattgttaccttttcaagatcaaggacatcttccaagtcatcactgaattcaactgacttaacgtcttgcttatcaccaacagtgtattcaaccttgtaatcaaagtccttgtcttcttgaaccttatctgattcaccccattgacccgactcagctttaacttgcttggttactaagttaccatatgggtctggggtcttgccatctggcttagaaggatcgttaggcttatccttcttaggatcttcagggttctttggatcaccattaagcgtagtatgaacaacattagttggggtatcttgaccgttaatttgcatatgaccagtgttaggaataccgctattgtcataacttgatacatctgcattcggtttaatgttagaagcaattgcaacatatagtttcttacgtgagaacttagctggatcattagcagtccaagtaaagctttcatcctcatctgaagtaactaacttaccttcgttagttacattattaccatcactatcaatgatgacgacattctttaagtcaagcacattctccaaatcatcacttaatacaagtgatttcatattttgagaattaccaatatcaaacgtcaacagataatctacagcatcaccacgtgaagcttggttattatcaacagttgaagcactaatgatttgcttcaagtcctctttactagttggagctttagttgctacatctgaactagttgcttctttacctgcattagggtttgagaacggcttttgtaagattttaacagcttctgcatactgttctaaccttatcattagccttgctccaaatgccagtattagggtcaacctttacatattcttgcgctttctgataagtcttaggtaatgcaccatcaccatcagagtcttgtcctgaggaagtttcagacttattgccaaagaatttcgtccaatctgcaggattcttaacaattcccttatgtgtcttaggttcttctacctttggggtcacaactggagtatttgatggggtgtctttaccattcgccttaaagtgagccgtattgggaatttcgatggtattgtttttaatatacttttgtaagtctgcattgtctttaactttggcagtaacttcaactgtatatttcttgccaggcataaccttaaccaagtcagcatttggttgccagttaaagctttcattcttttcatcaagcttaagtgtaccttgttcagtggtaatatctttaccatcggcattcttaacaactaccttttcaaggtcaaggacatcttctaacttatcggtaaactcaacatcggttaaatgttgcccttcacctgcagtatagtcaatcttataagtgtagtctttgccaacctcaacattatctttatcttcatgataggaacctgatagtccttgaacacttttaactaccttattttcggctggaggtggagtttcaaccttaacaggatttgaaggaatatctttattgttgtacttcatatgagcaacattaggaatttcgtaattctttgttgctttattcaagtatccacttaaatctgcatcggtcttcagcttgacagtaatatctgcagtgtagatatgctttggcatttgagttagatattctttagaaggttgccaagtaaaactttctttatctttatcaagttttaaatccccttctttagtaacttcatttcccttgtcatcggtgatcttaacgtcttcaagatcaagaaccttttccaaatcgtcatagaaaacaacattactaatgtctttaccattttcaggaattgaatattgaactcgataatggaattcatcaccagcgtcatgcttggctttttcaccatattgaccgttcttatcctctacttgcttaattgcagtaggttcttcatcattcggtgtatgaacataaacaggtggggtcttgatcttttcatcgttatagatcatttgaccaacattaggaatgttgtattgattcgtattcttatccaaatacttgtctaagttagcattcttttgtaacgtggtttcaattcgcatgcttaacttcttacctacccaatcttgaggcttcttagccgtcatattggttgtatttgtccccttatcaaaatctgccgtaaattgatcagtaacatcagtgttaccatcaaaaactctggttttattatgagtaaacactggctccaatttatcgaaaagaaccaatttctttagatctgcattgtatggaacttggtagtaaatatcaaaagcaatatctgatccctttttaaaagtagcatcactcacatatttcacatcagctgttgcatcagccttaacaatattagggtttgcattatggtttgcgactgctacacctacgcccacactacctagagttgctgttacacctaatgcagatagcaattctctagtttgcttttttgatagctttttcaaggctattcctccttaatttaacaaaaaaaacacctgcatttttgtcaatgtcacaaatcaaaacattgatttatatgtaggtgttttctaataatatataattattggcaattacttgtcttttgataattgcttgattttgatagaaaatggtttatttgtaccatcttctaaccatgcataatcaagttgtgcattttcactatcagcgagatcattagctttttctgtatcatagtgtaattcaatattattgtcatacaactctcttaagcaagcataaccaagaattgccaagaaataattcttatccttagtcttatcttcaaagacatctggatacaaacgactcattctttccattgcatcaatatattcactttccaacattacggtttgaaaagcataaggtctatctaccgctgtataaggagtatatgctacatatggaaaacgtccataatacttgctagccaatccttccgaatacttaaggaataaccagccagcccataaaatccgaactgaagccactcgattgtcttttctatctactagccatgcaggaaacctttctttaataattttatttgtatcagcaagcatagcttctggtaattcaaaatctacaaaaacttgttttgccataacattttcctttctaaaaatcaaaggagcctctaacatacttagaagctcccttataactttctgagccagtgtatttaccacgaataaaaagtctaccttgacctgtccagtcacaggtaaacaacgaaattactggcttcttcttaaactctttattattccaagctaatcttaaattataaactgaaataaagcgtgaagatgtaatcttgtaataataaactttcttataatctgttaataagattgttgttccattaggtagatttcctcttaccttcgcagtatataatgggctaaagaatgaacgcccatcatccatattatgacctgctaaagcgtaattgccttcacccatcctctgatattggttcattgttcctgcacctaagttcagttctacattaccaactccacgatagatatttaatagaacattatgatctcttattgctatttgtcctacagctcgataatctcttctatgctgatatgcattggcaagagattgaggtgatacaggttggacagccttcatattaaaacttggctttttcttctgtttgttttttctttgactcgacaaatgattagttgccacatagttagcagcttgtccttgaatatggtcaaaattagcaatgcagtaaatcgcaaccccaattaaaattaacgcaataatagctattactgtaccaatttttttctttttatcactttttcgctgttgattaatagctaatctactttttttattttcattttaggaacaaaaaaaggcaattagcataactaattaacctttatttctaatttctacttagcagcttcccaagccttaatccattctggcgaataacttcccacaacggtaaagtttaattccaaaccgtgatcgatataatctccctcattattgaatctaacttttaaagcagcataagcatatttatctttatgtccttcaagtgttctcaagtctatgttgttgtcttcttttgtataagcattaaagatttcatctgcgactttcttgggatctctttcttttagattaatgaagtgctgtttcacattattatatctgaaggcatctaaatcattaagacttctcgcactatccattcctaacgcctttaatttaggtaaaaatttagctaaggtatcagtattttgaaatgtaccaataccatcacctaaatcgttatattcaggagtacctttttgcataattcgatttacaaagttattcaactctggatttgtcttgtaggcaggataacctttactttggcgataagcattgattttttgccataaataattttgaatttgggatacttggtcatcagtaaagtagatataacctttttctttgatccattcttgttttttagattgagaatttgagctattatgcttattgtcgtttgcagtactattcttagaattattagtctttttttctgctgttgcagaattgccagtagtattacctactgcagtattcgtagcattattgtttactgggttattagcaccttcagccgaagttgattgtgcattcgtagctttcacatattgaccattgcctaaggacaagtaatccttgccattaattgtcttaacaccaactacagtaaagacatggttcttctttaaagtatcagtgcccttgattcttttgccttcagcgttataaacataagcattgtgggttaaataatattgaccgctagccgtattagctttactggtcttcttagcaaaattagcaaccttaacgtattgattcttaccaatgcggtagtatttcttaccataaatcttctttgtaccgagaatcttaactgttttacccttcttcaatactttcttgccataacgattgccattactcttataaatataggcattatgagtaagcttgccattttttactgctgcttgtacaacatttgtattattagcaacaccatttatttcattaacacctactgctccaactgataacaatgttgcaacagataaacttactaatacattctttttcataaacataatttgctcctctttccttcaaataattcagcttaaattactcgctaacttttccccgctctcacctgctttcattatactacatacgcaacattatagcagcgggatatccgttaatttttattattttaaaatatactcttgcgtacatcttccaaaacgatcatatgtaaaagataacttcacttgatcattctttcgggaaagtaatgcacgtaatgctaatgtttctttttgccttaaaggtgtaaaatctttagggtattccctcgctaattgattgcgataacggacatactcatccgccgttaatcttgtaacatctaattttttcattacattaaccaatcgatcaacgtaatcaaaattattcataacttttcatcttaatttccctattattatagtttgtgatctctttttaattaccaacggttttacgctatgaccgataacgatgatggtttcttagttagccatcaaactgtaagtttttgtacagtacgtagcagatagcttcacctatctctaacctctcgcttcacgcattccgcaagctatcctcttatcaatcctaatcaaagactctttcttgcccttcagttactacaacacttaaataattaagtttattgactcacttactgttcttgatcacactccgactttttatttactcttgagtttttcatcaaggtattcacatgttaaaacagccaaaaagaatgtatgcttatcttttagtagcctattacagctattactattactttaaattttaaatttcgttcaaactaagacttatcatcaagccaaaaataatagtaatctttattgatggacggctatctccatctcggcaggtgtgattctttcttcttccacccgttgtgccttcaattctctgtcttacaaatcctattgagtcggctcaatagtcatgcacacgtcctacacccgttgcagagcatagttgacgcttattctgttttcaatgtactagtggactgtctaccagtcctaaaagaaatagctgagttgaacagctaaattattgatcaaaaatcaataattgtaccgactttcttaatgattaacattctaaggattttgcctcttttacttgatttgtcacgactactgccacaataattgctcctgtcacagctaacgcagttaaagcaaacttgctaaactttttcacgtttatcatctcctctgattttcgtttacccatttcttcaatgctgttttatcaatttttccttcttgatagcttctcaataatttcaaataattgcttctagcaacttctttttgtgtaattcgttgcagtagcttttcttgttgcttcttggctttcttaagccccctattaacggaaaaacttggtgggaagccctgatttcttgcgattgtttcattaacttctgttaactgttttcgcaaatcattaatttgactatcatacctaataaggagttctttaggattatcatccatatttttcttcaaatttttcatgtttgaatacgctcgccagacgtaataaacaatataaatacctactgcgactgttattaacttatacatatttttcctcactagattagagcggaaagattcgaactttcattgcaagtattgagtattaaagtattaaaaatagggatatatatgaatatcaactttttgattcaaaagaggagcaactcctttaaccaatattcattccaacttgcattttacctattaaattatgccctagttttacattaaatagctccagtaatatccgataaataaaatcatgatccatagaataattccaagaatcgatagcagaactgtcactaattcatccaatttttcaaaaaagttagcaaaccttgtgcctgctaaacttggcaaagatgatattgccataagaataattatgaataaattccccgctccaaatgcgatcactatgtatcgaaaatgttctaatataaatgaactgatcataatatcttacttgctaacatcaattagcggctttttcctatgatgatcgggatattttcttttacacaataacctgcgatgtcctaatttaggatttacttcaaatccaaagcctaaataaatttgatcataaatctcatttactcgataaaaggttgtctctttatattttatatcggttttgtgatatttgagagataaaaaatattttgggtcttttataaatagtccatcaacattccagtaatggtacccgtctatcgtcagaatttcataaacttctttttcaactctgaatacgctaaagcgcctattttttactgacttccttgccatccaacactcaccaatcatactatccttaaaatggtaaatcagcatctgttaattgaacttctttttgattattaaaaggatcttccgctaatttatcttgcttatttgcttctacaatagttcgatcaacttctggctcttcatcttccatattattcatattttgtttatttgtattttgtgaagggctattggctatatcctcattttgactagttaagatatcaaatgaattgacccaaatatattcatacgctactctattaccatttttgtctacaaattttctaaccctttgttcacctgccaagattacttttgaccctttatgtgtattagctactaagttttcagcaactttattccaagcaattacatggtgccactcaccaacatagcctctttgaactttactataacggttttgacaaatagtaaaggttacatacttttttaaagattgagtagtttttaactctaaatcttttccgatgtaaccatccattacaacttgattaatcatatttctcgctcctctctcttctaaaatatttttgatatttatattatatatcgtttttgcgatatttcaagactaaaaataaaaaagatacagaatttttgttctatatccttaaactagctatcataactacatctaatttgctagaatagctttagtacgaaaaagttaaataagcggtggtactttcgttttcatggaggtggtgccaatggtgtattaactattgccctaaaatctattgaaaggaggtacagtttgccaaatgacaggctttttacagtctgtcatagccgtaatctatctgctttgtctactggtagtaagtctcatcttgcttaccaaaaaagtaacggagtggttcaaagccttaaaagatatgattgcagcatttcacgatttgtggaaaaagtagagcaaactaaaaagccgctcacaaacttttggcagagtttagcaactttttagttgtataatcaatgccaccgcccttttagcggcttcgtactaggagagctattagcagtagctctatttttttgttcactaatattatagcaactttacgctaaaaattaaaatatttcaacaacttattgggacacaaatgaccctaacattgcattcacacccaaaattggcaattgcaccgaactatattgggtgaagcttaattatttttgtcatgcttttgccttctttgcttctttgctctgcttaatttttcttttaatccaagcaatacccatagttacacccttaattcctagaaaaattacgccaattactagtgcaattctccatacgccatccatcaatgttagtaaagctgggaaaattaaataaattccaaaaactacccaaacccatttccatagatgaaacgctgaagctaggatgaagacccaaaccataatccaaaaccaatctgtttgtgaaagtactaaaaacatgctgtcctcctaaatatacttagtaatcctcattatctttgtctgaatttgaggaacattgcttgtagtgtcaataacaacttgtaaatttgcttcaatttgatgaacatctttagctctaatcaactttatttgctcatggggcacagttgccttaattaacaatggttcacccttagcttcaaacgaatgttgcttatttgatagcaagcctaaggtaactgtcccttggctcagacttgaatttactactttaagcgaaacaaaacgataatctacaatctgtttatttcggctggtcattcttttaacatatttgtctttaagttccagatgtctaaacaacacttctagcccaattagacttgttagaaaataagataagcatgtactaagaaatattttcatagcttgctcctctcaatcactacaagccacttaccagctccaatatatttgattttttgatcagctctaatactaattagttgaccatttatttgttctacacagacatcaaaactattgctatctaccggtcttattccaagcacatcacgtctaaatcgccaagtaaagactttagctaattcagctggtgtagtcatcacaccagaccacaaatcaaacttattcattatcattctccagtacgtccttaatcaattggtttctaattaatgtttctttaagtaaaacgttaatttttaaaacataatctggataaagccgttgtttcaaaaccatagagctatttcccattaacccgaatacttcacccaccaaataattacttaattctaatttctgtttttcattaagctgttgtccattcaattcaaagttatctgacataccgagcagcataacggcaaaacaacctatcttcaatttgctgaatatcaatcttatcgttaagtaaatcttgtgcaacttttttatttcttggactcattttctactttcctcgttatctagttaatttcatttatatcaatatcttttagttttatacaaaggtatcgcaaaaatgatatattattaatgattcaatccgtattttttatttttagaggtaatattatgaaagataaacttaagcaatctgtcattgccataacaagtgctaacttaaaacggttattattcaatcaaaaattaactcaacgtgaactttcagcattaactggaatccccattccttcaattaatcgatattatttaggaaatggtgcaattccacaaaacaatctcattaagattgctaaagcgctgcacgttaatccaaatgaaattgacccttcatatcaaccaactcaagattttttagccaatttagcaaaaaaaactgatgatcctgaattaaactttcggatcgattctctcaagcaattaattcaagctagcaatttatctgttaaagaactagctgataagcttaatttaaagccgattacagtttataaatggttagcaggggtaaatacccctacccaggaaaacatagctaaactagcagctttatttaacgttagcgttgaatctttagcagatatctccaccaatttaaccccacaacagactaaaatactgaatgttttaccaactgatttaactgatcagcaaacggatttaatcatttcattaatcaaatctgtcttagaaaatgctaactaacttcatattcttctgtagtttcaaacacatttgaaatttcagcaattaatgctaattgacaattaatttgccattgccaccaattcaaaacatactctagttgattttctgattctaacgtcacaactgaactagctgatacttgcaattctgtgtcttgtagacttgttttaatctgaattgccacactatctgttgatgtcacggttttttgcttaatttttagatgactatcactaagtaattcacttaacttgttagtagattcacttaaattcaatgtccagctagcagggagtaagtcattaatggcgtaacctaactcgtctactttgaataaaaattcatcaaaattttcttttttacctgttaatttcattgtttttctccattttttctaaatctctaacgttctgctattttgtagagcgttttttattgcttttgatctagctagtgatctttgcattccaatcaatctcatgttgatgtttttgcatccactcacaggcttctttagcgaaaatgattgttgtcttgccttcaggagtctttctaggatttactacaaagccccctttcttgtaatcaacttctggaaactcatcaaatataaaagttctcacccagttatcgcctttaccacgacaacaaatttctctaaattgtttgatattccaagtttttccagttaaatcattcttgtcttctttgacagtttctttaacaatacttttaataaaattcgtaagacttggaatattgattagcgcattagtcatatcttcttgcatctttatccccagctttcataatttttgtcatttgctaaaccatctcttagcaatttgagtaaatatgcaaatggtttaccgaccatgtcccactccattcgctctttgaatttatccttcacagctcgtagagtgtcaacatcacattcatatagcaactttctcatttgcttaatttcatcaagagatggtctagttgtttgatttttgcgtttatcgtttattcttgcaataaagaaaaattctttgtagattttttctctttctggatcttcttctttcttcctagaagaagaattattaactgttctattagatgatctattaactctgttatatttattaccggtagctgggtatagggtagtgcgagctggaatactagggtagtccgatgtatcagaccaccctatacctatatgttgagatagggagtccccagcactaatttttctgcctataatcgaacctgtcctttcatctcgaaccgtttttcgtttaattaatccttttttttccaaaattttcagataatcattaacggtagatttagtacaatctaagcgatttgctatttgtttgttactcataaaaaattcgcccgttacattaagcatggaaactatctcacccataagtagaatagttttcggcttttttaaaagctccttatctcgtgaaattccgataggaatattcaaaaaagcttttgaaccttcaaattgtttattcatcctctaattcctacttttctatcatgtgctaatttagcacttgttaaacaaaaattttttctaatgggattcccagttttttcgaaagtgctggtagctccgttgcttggaacttatatgtgccatgctccctcctaaaatacttatctgggctcgcaagtcccaggctattagccatatcttcgttagaatatcctaacttaagtcttttctcacgaataagagccaaattgattttacgtttcaaaattttctcctttctgttgcgattatcgcaccatcactatatgtattatattacattgctattttagcaatgtcaacttattttttgcttttttagcactttttgactaatttgttgcgatttatgctatattaattgcgaaaagcgcaatagaaagtgtgaagacatgaatgaacaagaattacttgccaaaaaaattgttaatatccgtgaatctaaaaatatgagtcaactagaattgtctaaaaaagctggtattgaaagaacagctttaaataaaattgaaaagggcactagaaaagtatcaagtgatgaattaagacgtattgccttagctttacatcaatcatctgataatctgctaaatattagtaatacgaatcatgtagatattactaatgctgacttaaacgacatgattaataatgctagattcttcgatggcaaaccaatggacgaccacgataaagaattagtcagagatattctaaagagaatttacaatgaaaaataggaaaaggtgtgcattatggacactgaactaaaaaaaatacttaaggaatcacacataagattagaatttgctcctctacactgcccaggtttgcttgttcatggtaaagataataagcctgatgtgatgatagttaactcaagctatgatgatgagcaagctaaaaatgtaattctacatgaactgggacatatgatgtacgacaaggatgtgcaaggtgattatcaaagcgacgactgcgcacacacttgtagtgaacatagtgctaattcctttttaatacatgaaagagtcaaacaatactttgcgttaggtaatgatcttcaaaccgctaattggctaaattttgcccaaagtatcgggacaaaggattactttcaagtacaagaagaactaagtaaatataaatttgaagaatgagtctatgaccaaactaaatattactaactatcaaaaatacccgcctacttcactatagtagacggggcaatttatataagcagcatataagtaacttatacgtaatgcataaataacatatgaataatttaaatttaagaggtaaataagatggcgcattttgaaaaaagaggcactaaatggcgggcacaagtatcttggtatgatgagcaaggtaagcgttgttttaaagtaaaacaggggtttttaaccaaatctgcagccagaaaatgggctaatgaaatggaagttgcaaaagacgccaatcaaatatctaatcaagaccccatttttgctgattattttaaggactggtacgagacctataaaattcctggcaaatcaaacaacactcaaaatagatataagcacatttatgtattactacaacagaattttggtaaaaccagaatttcaaaaattactcgccgctcttaccaacattttatgaattcgtatggaaaaaagcatgttaaagatacggtctataagactaacggaacaatacgaacttgtgtaaaagacgcaatgagtgaaggattagttaaaattaattttactgagcgcattaatcttacatggaatgaggaacgttcaagaaaaattgaatatttaaactttaaagaggttcaaaaactaaaaaaatcacttttaaaagatattactccctcttatatcagtcgttatatgctactaacaataatttatactggaatgcgtccaggtgaaattaaggtgttaacatggcatgatatcgacttcaagaatcacactattagtatctctaaatcgtgggactatgataataataaaataatcaattatgattctgacgacataaataaagaaacgaaaaataagtcatctactagaatcatcaaggtagatcaaaatttattgaatattttagatcaactaaaggttaatcatcatgaacgactattcatcggaaaggatggaactattccttcatcaaatgctgtaaacaaagttcttagaaaacaactggcaaaaaataagattaaaaaagatggttttcattttcacagtttgaggcatactcatgtagcaatgttactatttaagggagttgacttatactcgataagtaaacgactaggacattcaaacatgagtattacagctaatacttacgcttatatgctagacgaattaaaacaacaatctgatcaacaaatagtaaacattttagatcaaatttaattaaatggataccttttagatacctctgcaaaacaaaaaccgctctagaacaacatctagaacggttatctatggagatgaggggaattgaacccctgtccaaacgcatctcgtcactgacctctacgatcatagttatattacttgaacttcactagctcaaaacgccatataacagggctagaatgggctagctaacctgttaagactctttttaactattcaggtgaggtagttaaacgtaactcgctaaagttgatactcggtgtcagccacgagtaaaccgacaaggagcaacacatgcgcttaaattaagcagctaatgcgtaagaatttttgttatttgcagttatatttaactgtaacgtttttacgtagtcgtaacctacgaaccgcagtcaatgcgggtctacgcctgtcgaatcccaaaacatccccttgagatacttattcattatagcatagacacacattacatgcgataaaaatgcttaatcaatattagtcaaacgtaccacatcacgttcaatcatcaattcttcattagttgggataaccattcctgcaactttggaatctgtttttgtgattagtccttcactaacactttcattagcttcattatctacaacaacacccatatatgcgaaagcgtcaagaaccgcttttctcacaccagtatcatgttcaccaataccagcagtaaagataattgcatcaacgccgcccatttcggcaatataagcaccaacgtagcgaataatacgattaatgaaaatttttcttgctaacttagcccgttcgctatcactttcacgcacatcgcgcatatctggtgaaattcctgacaagcccaacaaaccagacttattattcatgatataaatcatttcatccatcgacttatgctctaccttcattagatgttgcacgagtgaaggatcgatatcaccggttctagtagccattgtaattccggcaattggactaaagcccattgaggtatcgtaagacttgccatccttaactgcagtaattgatgcgcctgatcccaagtgacagatgactaactttaagtcttttaaatctttacctagtaatttagcagcacgcggtgctgtatagcgaattgaagtaccatgagcaccatatttacgtacaccatatttttcataatattcataaggaagtgaatacaaataatgtactggatcaagattacggtgataagtagtatcaaaaaccgcaacttctggcacatttggtaaaacattcataaaagcttcaattccgcgagcctcagcaggattgtgaagcggagcataatctgacaattcgtagatcttaggcagattttccttagtaataatagtagaatccttaaagtactccccaccattaacaacacgatgtcctacaccgacaatttcagttagttcttcaacaacatggtatccttttaaaaacttgatcaataagctaactgcagcttcttgatctgggatttcagttttttcaacgtgcttagtaccatcagctaacttaatctcaaatgatgaatcttcaagacctacacgatcagccattcctttggcaagaaccttttcatctggtaatgagaataatttgtacttaaaagatgaactaccagagttaattgccaaaacttttttcataaaaattaattcctcttctttcaaaaaaataagtgctttatcaattaatgattaatctttgcataccactcgttaagtttaacattaaattgaattaaagcctcttcttttttcaaggaaccaagtttggtaagcaaaacttcacttgctttggcctcatcaccgtgattttggaaaactaaaactgacttttgattaaacttgttcttaaacatatcatctggcaactctacaatcgccttcaaatagactttcttagttaaccatggcataaaatcagcgccaatcttgcctgacaaaatagacttaggaactaccaaaaaggcatagccgttaggctttaaattattaataatttgttcgattaacaacaaatgagcaaaagaatgacctttcttagcctgattttcaaaattcttggcattctcatcaactggataatagcctacaggtaaatcacttacaattgcatcagcgttaggacacatccaaggcattaaagcgtcttgatgatataactcaatgtcaatattattcagatgcgcagccacatctgtcaaacttaacatatcttcatcgttatcaatccctaccaattgataattatccttagaatgattgagtgccttaagttgagaaataattgaaaacaacaaattccctgtacccacggcaggatcaacgatttccatcttttgatcttttaataatttatgcatcaacattgctactactgtagcaattgcaggtggagtaggcatttggttaacatcaaagccatcatcattaactgcctttaaagttagaaaagtaaagacttgagccttttctttttggctaatttcgtcataatctattgcttgatacttttgacttaattcagccactgttttttcatccggtgcaccattttcaaccttaatcttgccactttctaagttatcaaaagtctctactaaggcttctgtaaatgaaacatttaatgccgtttgcaaagtttgcacacagtctaaaaactgattaaaaagtttttcaaaattttccatagcggtccctccataccttaattattttatagaaagggataaagaggtgcaaggaaagtcaatcatccgttaagcattcgataattaggcgattgttctccatgctagcatgataaatatcttgatacattttgataaacaaaagcgtggtcattaaaactaatacactacttagtaaggcactgccttttacgttatgcgtctttttctttggttttagcatttttcttttcctgttcctcatcaagctgaaaaactaaatctgatacacccttatttttctctgttaccctaataatgatgctatctttagtggttttaaaagcagccttttcaacgttaaataataacggcatatagcctttccctgcaccagatactttaagtacgttctttttatagtattcaattcggtaagtagttgcatcgcctttttgatctatgcacttaaaggaagcactattacttatagctaatttagttactggatacactgccttaattttgtcagcccgcataaaattttctagctgtacataagcataggctacttcattgacatgctgattttgattcaagtttgcttttttaacactcaacaataaattttgtaaaattagcagcaccatcatagtaataagaagcgaaaacattgcttcagctaacataaaacctttactctttgaccgcaaaagtttgtttagtcgttgcatcccaaacatgattatgtcctgccttttgataaattcgatcgtgaactgttacttgctccaggtcagttttagtcagtatatggtaagcataagcacgatctgtttttaattccatctcacgaccatttttctgattttcagctacagttatataaaagcaactaacagcaatcacagcaattataattgctataaagctctcaattactagaaatcctttaacttttatcattccgctactctcccccacagcatttgatatttcaggcttttttccattccgtagccactaaaagtcaccgtacctggtttagaataaccagttaggttgaatttaaaatgatccaagccagtaattttgatattttgatcaactggaatacttttgtgatattttccgccagagaataaaatttgattggatctagctagatatgatacgccaatagtaacctccttgatcgtactgtacctcgaagtttgatcaagtgccgtcgtaactcttttaacagtattatcaaaaatcagtttttcttgatatctttttaactgcaaactaccaatcaacaaaatgccacagcaaacaccaagtgtaattattacttctagtagggaaaagccggctaatttatttcttttcaacaacttcgccactgtctaacgtgaaattctttttagctttagtaatttgatcaccagttaagtaatcgtccttttttagatcttcaaaatctttaggttcaccatatttatccttatataactcaacttgcgtttgcacagtagtcctaaatgcatccgcagttttagtttcagcattcttcttttgattaatcaaattaggcacaattagcaaaatcaaaatcacgataatggcaattaccacaaccatttcaatcaaagtaaaaccctcttgcttgcggcgcttagccataatgtttgctaaatacttcttcatcttctctttcatttttaacttaatcctcttcttcactctattttttacttttatctttaacgtcactttttctatagtccttgcatcattgaatacattggtaataacagcttcaaatacattccaataatgcataagccaattaaaataaaacaagctggttgaacattgacgactaatttctcaattttttcagttaaatccaaaaataggctacgtcctaataacaaacagcgcttactcaagctctttcgctcagagccagtctgcaataaaactaataaactattaggcaaaaaatcctctgcattaataatttcttctaaattttttccttcagctaaatcgtgccctatcttttgtcccagtgcttgctgcaatgaacctttctcttgatctgccgcatattcgcacattcgctgcaatgaaaagccactagctagcagcagtccaatgtcataaaccaacaaataatgaatatacagcataactacctgcccaattaacggatatttactcagttttttcattgatgaataatcctgtttattgagcaaagtaacgatcttagcaaaaaaatataagcccagcaatacaataatgatcagaccaatcatgaccatatctcctgaatgatcactgctatcgctgaattgtgtcgaaataaacgattgcataaagaccagtaaaatcaccatcattatcgctaaaaccaacggataagataattcagcccgcagttttttcatctgctcctgttttagtcgattcaacgttgctaaatgctgcaaacattcaactaggtttccttgctgtaaagccaaattaacctgagttactgtcgttttagaaaagcctagtttaagcagttcagtactaaaacttgctccttctttcatgcgactagccattctttccatcaactgacgcctttttggccacaatgccggcattaattcaattgaattgagcaaagaaaaaccattatctaaactatgttttaaataatccaaaaaggccaattgttcttcgccatttaacttatcctttttggaattgccaatatacttcatgattaatttctcctcctttccacaaacgctctagattttcctgccaattaacgaattcaccacgaaccgatttgcctagctctttttttaacaaagaatctgccgcaatatccatcaagcactttaattttccttgactgactaataatcgctgatacgacactgcagttagacaatttgtcagttcgtcacacctaatacctaatccctctagtcgagaaatagtttgcaaagtacttttagcatgaactgtcgcaaaaaccaggtgtccacttaaagctgcatcaactgctaaacgtgctgttccttgatcacgaatttctccaataattaaaatatctggacgatgccgtaatgccgcctttaacaggttttggtaatcaattcccgcttcgttattgacttgtgcttgcaaaaaagaagactcatgaatttcaacaggatcctcgattgtcatcactactttgttttggctcattttcttagcaatttcatacattgtcgttgtcttgcccgagccagttggaccactagtaataatcaatccgcgactcttagccagcttttcaattgttcccagctgctctggaataaaatattgactatggtcaatcccatagatgactcgaataaccagtgactcttgatcggaaaaatctcctaagctagataaacgcaagaaatattcatgtccttcattctcatatgtcattgcgccaacctgcgggcgacgatgttctgcaatatccatctgagcactgtacttaaaaaaattgataatttcctttcccgtctccaaagtaaaacctgcatattcaattagacccttaccggtccgaaatttaaccatcaagttttcttttttcgggaaaaagaaaatatcacttgctttaactttaattgcctcaattaataattcactgacaatttctttgatcttcataaaaatcctccttttttgcctcacattatttattacgcaaaaaaagtcgatttttttgtgagaaattgaaaaaaacacaaaaaattttctcaactctaaaaaacgttgatctaacagcatttcaagattaaaaaatcattaaaaagtacacaaaaaaatagcttagccattggctaagctatttcatcattaactaattaatcttcatcagccgctgcagtataaacattttgaacatcgtcactatcttcaagagcatcaactaaatgttcaaattgttccttcttatctgctggaactggagtggtgttttgtggaatcatagttaattcagcatctgctagtttgtaaccatccttaattaaggcgtcacgtacacctgcaaattgctttggatcagtgtagatttcgtatgcatcatcactagtttgaagatcgtcaccaccagcatccataacatcaagtaatacttgatcttcatcagcatcagtagttgaacgatcaattacaatgtagcctttacggtcaaacatgtaagcaactgaaccagtagcaccaagtgaaccaccgttacgagtgaaagcaacacgaacgtctgaagctgtacggttcttgttatcagtcaaagcttcaacaaagactgcaacaccacctggagcgtaaccttcgtaagtaatttcgtcgtagtgttcttctgaaccaccttcggccttcttgatggcacgcttgatgttatccttaggcatgttgtttgaacgtgccttatcaattaccatacgtaatgtaggattcccatcaggatcaggaccaccactctttgcagccatataaatttcacgagataacttttggaaaattttacctctctttgcgtcttgcgcattcttgcggccttgaatattgtgccattttgaatgtcctgacataaggatccttctttcttttttctaatattaattaacgttattatcttaactcacagtactttaaaattcaatggtgtcaaccatttaaacttgttttttctggtcaaaaaatctgtgtttaataaacaatactagcattatcagcaaaattgccgttaaagcccctgctccatcaagcattacatcgtgcacgctcggtgttctatcacctgttaaaaattgatgatattcatcaaacgcagcaaatgcaattgccataaaccaagttaaaactggtgctacccatttgattttgaaaattcttcttaatcctaaatagccaaaaccacctagtaaaaagtaagaaccaaagtgagccattttgcgtaaaacaaattgagtcagccctgctcgaccatcaacttgcacattatgaatacgaccgccgtaagtaaaattccagccagcaacgatattctctaaccagccaaaataacggttaattttattgtcatgaatttcctgctgctgataagtcattgaactagaaatgaacaatgcaactagcaccaataaagcaagcagtaaaaagattttttctcgtttagtaaaatgaaatttatccattgctatttcttctctcttttttacttcttactttaacaaaaaaacgggttaaacttgacccgttttataaattatttaactttgcttaatgcttcatcaattggtgtgtccccatcatgcataataattacttgatgaatcgtattatcatactttaggctatcaaccaatacctgagcaacatcatcaatcgaattttctccaccttctggagtaaatgatgtcttacccgttgctggcttctccattaagttacctggttgaatgatcgtataatccaaattagtattatgaattaaccattcatcggaaaagtacttagcaatatcataatcaataatgcttgcaagagaaggaatttctgcccacttgtcttggtcaagcgcaaaggcggagcttagttgaacgtaacgcttaacgccattagcttcagcagccttcatcagcttaactgcgccatttaagtcagtttgcaataagtcctttccacgagaacctgctacaaaaatcactgcatctgggtgacctaattcttcggtcagcttattaagcgaatcatgaaaatccaaatgttgaacagtcacatgttctggatcgacgacttctacagcattttcacgtctagctgcagcaattacatcgtatccttcatcaactaatcttttaatgacagccttaccaacacgacctgttgcacctgctacaagtacttgcataatcaattcctcctattcattgtgaagtttaccaactagccttcttaacacctggaagttgaccttgatgagccaattctctcatgcattctctgcataaaccaaacttccgataaactgaatgtggtcgcccgcagcgttcacaacgggtgtactctctagttgaatattttgctttttgcttattacgaataatttgtgatgtttttgccatattaaacctctatctacgtctttctattctttgaggcgccggcttcttatctctagttaacaatctcaacgccaaaataataattccaattgccattacttgtccagtcatacgtttttcttcctttcaatttgctttattagtctcttacttttcgtcagtgattattatatcacttacatttaataagttaaacatttttatcaaaaaaatagaaagcgtttaacactagtcatcaacacatataatagttagaatctatttagatactttcacaatgaggagaaaaaatgaacgaaaagtgtaaaaacaaatcgccagccttcttattcttttaagagagtaaaagtttttaaagagaaggatgagaattaattggacgatttaatttcaacaaataaaatgaagaccatcacttggcctgttttgaccctaatggctttatgtacagttatcggtttagacgatatcatgtacaactttcaaaaccaagggatgcctgttatcacctcttggattatcatgtgtttactttaggtcacaccttattcactaatggtagggcaactaggttctacttttgataaagaaggcggcggactttcttcatgggtacgtggtactgacggtgaattcttaggttacttcacggcttggacttattgggctgcttccattccttatgcagttgactctgccaatgaaattatcgttgacttgggttgggctgtaactggaactaaagacttccaagataagatcccaacttcattgtttgcaattttaacctttgtagtatttattgtctttatcattgtcgaacaccacttttctaactcaatggaatttctttccacgattggtggtggattgatgattatcatggttatcttattcgtgattttagccttcttcggcttggttaaatctggtggccatatggcaaccaaaaactttggcttccattcaattgtgcctaacttcaacttacactactggtcaacagttggtatgttgatttacaccatgaatggttgtgaattggttgcaccatacgtaaccaagatgaaaaaacctaaaactgattttcctaaggccatgattgctttagccgtaatgactgccttcttgactatcttaggttcatttgccttaggtacttacttcgacgctaaccatattcctaatgacttgaagatgaatggtgcttactacctcttcgatatgttaggaaaacaattcggcatgggacacttcttactttacttctgggcttggacatcactgttcttcaattgtgctttggttgcagtcttgcttgacgcgatgaccagaatgttgatttcagacactggtgacaagtacatgcctaagtttttgcgtaaaaaggataagaatggcttgccagttaacggctatatcttaactgttgctctttcatcattcattatgatcttgggtattttcctacctgatatgaatgatatttttaactggttattgaaccttaactcaattatttcaccaggtgtaacctgctggatcttctactcatttatgcgaattagaaagaattccaagaagtttccatcacaatatgtttatattaaaaacgataagttagcttggcttgtcggtttactattactattagtcactgctgctgcaactatccttggctttgcaccacaagatgttaagcagggaactggcttatggtggtatgaattaatcattaatatcgttgccgtagttgtcttaattggtttgggtgctatcttaccaggtattagacgtcgtgaagttgaatacggtgttgcttttgataaagctcaatggatttggatgggaatcttgattatcggttcaatcatcttagatatttggttaggtagcacaaaattaccgatgagaattgctttgattgttatcgaagcagttgttgctttgattttgacttggttagttggtagaagaaagccagctaatgctacgaaataataaattattctattcaaaaaggaaggcacgcaccttcctttttcttatacatattttttcaaaaattcacttacacgacgttgatattctctagggtatgtctcaaaagaacgagcatgttttgcctttttagcaatccacaactgttttggccctttagctgccttgtagtttgcataaaccattttcgtcggcacaaacggatctttcccaccatgaataaacaacattggcttattatttttctcgacagaattaaccgccgaagcatcccctaaataaaagcctagatttgctttagcaataacactcaatccattcacaaaaaattgaccaactggaccgggcaaatgataaatatccttagcttcatgcaaaaattcatccttaacactagtatagccacaatcttcaatataagccttaacctggctcggcatcttaataccacttgccatcatcgtcgtggctccacccatgctgacaccgaagatgacaatcttctgctttttgccttcctcagcaatcaactttctcacccatttacgcacatcatacttttcaggccaaccatagccaatatattttccctgactttgcccatgtgcacgcgcgtctggcatcaacacgttataacccatttgatggaacattgctgcatacggtcccatcgtatccttgttattggtaaagccgtgcaacaaaacaaccgccttatcagaatttttcttcggaatataatttgcatctagccgataatcaccagtattagacttaatataccatctctgttttttagcatcttcataccagcgcttcttctccgctaacggatcttttttatttttactcgagtatttattcaaaacagcttttttaccaggcacaaaggccacattgaaaaaatatgcttctcctactccaatgaacgcaactaatacagcaacgataattccaatcgtcacccaaaatttccttctgtgttttctattcaaaatgtcaactcctatataaaacagatagaattaattatacgcttttaaattttatatggtatattgacatttttatcaaaatattgctcagccctgtacacaaaacttctaattttagaataaaaagatgatgagatctgctgtctcatcatctttttaactagtatagctttaatctaaatctgcaccatttgaagcaataactttcttgtaccagtagtaagaatcctttggcattctatctaaagtacctttaccttcatcatcacgatcaacatagataaaaccgtaacgcttagacatttgaccggtaccagctgatacttcatcaatacagccccaagtagtgtaggcacggacatcaacgccatcttcgatcgcacgattcattgccttaatgtgcattctaaggtaatcaatgcggtaatcgtcatgaatcttaccatcatcactaatcttatcaacggcacctagaccattttcaactaccatcattgggatttcgtaacggtcatacataacttcaaggtagtattgcaagccatctggatcagttgcccaaccccattctgaatacttaaggtatggattcttagcaccagcggcgaagttaccgccaaccttatcttttacttcatgagttgtgataacgttgctcatgtagtaagaaaaggtgtacatatcaactttaccttccaacatatccttcttatcttgctcagtaatgtctaagtgaacattgtgttctttccaaagacgcttagcaaatgttggatacttacccttgcattgtgcatccccacagtagaaaatattttgttcccacatatggcggttagccaaaatatcctttggatctgggattaatgtgtaatcaacgatcccacaaatcatattccctaccacataatcaggatcaatttcatgagccaacttaactgcacgagcactggctacaaattgataatgcaatttttgatatgcatgttggtaaactttatcatcagtcacattgttaccaaaggcactgagcatcagtaaagttgagttgatttcgttaaaggttaaccagtactttactaaccccttgtattcttcaaacaaagttttagcatatttaacatacatatcgatcatttcacggtcgccccagtcgtggtatttttcactgaggtaaagtggatcttcatagtgagaaatcgtaactaaaggttcaatatcatattttttacattcttcaaatactctacgatagaaatcaagtccagcttgatttggcttttcctcatcacccttagggaagatccgagtccaagcaattgataaacggaaggttttgaaacccatgtccgcaaacatcttaatatcatctttgtaatggtgataaaaatcaatcgctacatggttaggataatattcattaggatcaattgcaccaactgccccttcaggaagtcccgcacctggaactcctggtgttttttctaacttaccatttaacttgtaagtcaacattctaggtgcatctaagctacctgcagtagtaatatctgttactgataggcctttaccatcttcatcatatgcaccttcgatttggttagcggcagttgctccgccccataaaaagttctttggaaatgacattatgattctccttttctgaaagcatttacattaattatagactaattggtttgaacttgaccagttgttttaacttctgcggtactgccttgcaaagacaaaatttcttgaccaactttaacttcaccttgagctacttgctgtacagattcatatttcttagaattcgtaacaacaactggagtagtcacttcatagccagcagccttaatttctttaatattaaatttaaccaatggatcacctgctttaacctcttgacctttttctactaaagtcttgaagcccttaccttgcagattaacggtatccattccaatgtgcattaatacttctgcgccatctgtagtgttaagtccgacagcgtgtcctgttgggaaaactaaagcaatcttaccatcagctggggcatgaagcacaccttcgcttggttcaatagcaacgccttcccccattgcaccgcttgagaatacttcatctttaatttctgataatggttttacttcaccgtttaatggtgaaactaatttggttgaaggattttccttttcttcacttaaaattgcttgtacaggagcactcttagtaatattagctgcttcattagcggcgtcagcaactttttgtgcttgttttttattatattcagcatcaactgattttttaccaaagagcatttgaagtgcaaaaccagctataaatgctacaataccggcaataattacgccgacaattgttgtcattgatcctcccttaggattaatgtaggccggaattgcaaagaatcccattgatggcataatgtacaatactgaatgaaaggcaccaatgattgcacctgagactgcaccagcaatacagcttaaaacaaatggcgtttttcttggtaatgtaataccataaattgctggttcagtaacaccgaacagtcctgagaaaaatgcaccagtagctgtttctttaagttttttgtccttagtttgacggataatagctaaaacaacaccaatttgcgcataacaaaccatgcaggataaacctagaattgggtcataacctaatgcggctaaatctgcagtagttacggcaacgattccccagtgaacaccgaaaataacaagtacttgccaaagagcacccattaataaaccagcaataattggactaaagttgtaaacacctgacatcactgcaccaattgcgtccccaacccaagtcattacaggaccaattactataaatgcaactggtaaagcaataatcatagtgacaactggaaccaagaacatttgcacaactgatggaatccactttttagcccagtgctcaataattgaagcaaaccaaacggtaaataatactggtaaaactgtagaagtataattcatcgtgataaccggaatgccaaagaaagtcgtgtgaatctctgaggcaaaagccgttcctttaaacaatgtacctagaacagtcttacttgcagctaattgaaccatagttggataagttaaggttgcaccaattgctaatccgataaattgattcatgtgaaatctacgtgctgcagttacccctaagaatactggtaagaagtagaaaatactatcaccaattgcatatagaatttggtaagtacccgatttagtagaaagccatcccattgcgcctactaaaactactaggcctttaataataccgccagcactaagtggagctagaatatctgtaaaaatgcctgaaatcaaagcaacggctttatccacaaagctagaattatcttcaacgtcatcatcaggaacttgtccaccgccattaaagccgccttctttgacaacagcatcgtaaacatcagcaacttcattaccaatgaccacttgatactgaccaccagctttaacaacagttacaacaccatctgtatcttttaaaacatcatcgttagcctttttttcatcctttaatttaaaacgcaaacgagttgcacagtgaacaacactggtcacattatctttgccaccaacattttgaatgatggtcttggctaattcatcatagttcttagccatttgcctttcctccttaaaataaaaacccaagctactcaaaaactaaagaacataaatgttcaacgtctttcagtaactcgggttcatgcctaatcttcttagtaacatacctaagtaacttagatatttaattatcttgacgactagttacgcgccaaatatgtaaaacaagataaaattcatcatctgaatctaaatcccatcccatttttgcatgtaagtaagtggtgatccgctccgccgtctcatacgctttgctatatttgattttcataaaacctagcattgcaggatcaagtgaagcctcctccttttgcttatttcgtaaaaatctaactaacaaaatgcgcaaatgcgaaacaaacctactatagttaaaggagctcgtatcaagttgcattgaatattgcaattgaataatatcgattatcccacgaatcaaatttgtaatctgaattgtttcttgtacttgagaaacatcactcttagcattaaccaggtgataggtcatcaaaaccgactcactctgcggcaatttaatctgcatctcctgattaattagattgaccacttttttagctgccgcaaattcttttggaaaaagattttgaacttcccaactattgttagcgggagctatatcaatatgatctttaattcgcgtaactgcaaaatcaatgtgatctgctaaagcaagatactgaaagtcattgaacttaatctgaagcagaggttcgaccagctgaagtaccttattagttacttcaattgttttagggtcaaagcccttaacttgatccacttcgtctttagtaacgaagcgacgttcaattttgctttcatcaacaggatcacttttttttagaccaaatcctacgcccttgcctaggactatttcttcttgaccttggttattttcaattaaggcagcactattattaaatgttttaagaaatttcataataattcaccaccttagcaaaaaaagaaaaagctatcacaaataatgatataccaacgcaacattatttgtaatagctaagacctgatcgtatcagtaatccgctcacttacagttattataatagccaatattgtaagcggtgtcaatataattttgtgaaaaaaagcaaaatattttacaatgaactaaaaagcgaggtaattaaaatgaaattcgttcttgcacctgattcatttaaagaaagcatgacagcaaaagaagtctgcattgcaatgaaaaatggtattcaaaaagttattcccaatgcacaaataattgcggtaccaatggccgatgggggcgaaggtacaactgattcactcgttgatgctacaaacggtcgaaaataccaaataaatgttaccggtccgcttaatcaaaaagtatcagcttattatggcatctcaggtgatggacaaactgcaatcatcgaaatggcacaagctagtggtctctcctatgttgcaaaaagtaaacgaactcccgaaacaattttaaagactacaacttatggaaccggcgaattaattaacgcagctttgaagcacaacgtcaaaaagattattatcggccttggtggtagcagtactaatgatggcggtgctggtatggcacaagcgcttggtgttaaattttttgatcaaaatcatcatgaaatcacccaaaagttagcaggcggtgctttagatcaaattgctaatattgatctttcttcaattaatcctcgtattaaagataccaaatttttattagccagtgacgtaaccaatcctctaactggacctaatggtgcaagtagcgtcttcggcccacaaaaaggcgcagatgatacaactgttaaaattctagatcaaaatttatctcactatgcacaagtaattgagcagactattgataaaaacgtcgcccaaatttctggtagtggtgctgctggcggcctaggcgctggcctgatcgcctttactaacgccagtattcatccaggcgtgcaattaattgcccaagaaactaagcttgaagccaagatcaaagacgctgactatgtttttaccggcgaaggcggaactgattttcaaactaagtttggtaaaacaccctttggtgttgctaaaattgctaaaaaatatcacattcctgttatttctttagcaggctatttagatcaaggtattgatcaactctatgatgaaggatttaccgctatatttggcattcttgctaaagcagaagatattgagcaagccctaaaagatggaccaataaatgttacccgtacaactgaaaatattgttcgtttaatcgcacaaaaataagatgagctcgatgcccatcttattttatttcgttaatttcttaattaagccttcacagccacgataaatttcattatacgctgtttcaaaatcatttgtataccaaggatcatcgacatcagcataagagccagcaaactctaaaattttatgttctttatgctctgggtctccaccagtaatgcgattcatatctgcgaaattttcttcatccatgcagattaaatattcataattatcatagtctgagcgagtcatttgactagcacgatgaccacgatcatatggaatatgttttgcaactaattcccgttgtgcacgagcatcaatcccatgacctaaagcatcctgcgtagttgctttagattcagcagtatattgatctgctaggttattttcttttaacaaatattgcatcacggcctctgccattggtgagcggcaaatattgccatgacaaacaaacagaatttttttcattaccttttcttcctcttagttagtctatttataaccggccaaataatcgccgtaataactccaactgttaagccaacccaaatctcctgcgacaaagttacaagaatgccactataaactcgactttgcaatgcggtcatcgcctcatttgaggcaagccacaatgccacaaatgaagcaatagtagctagtgctagtggaattgacgccgaagagcgaccaaataaaatcaaaattgcggctaacaaaaataacaaagccactgcaaaaattgaatactcataaattgtaataatatggttcacatcttctgaatcttccttcaatttatgattaatttgcttgactaaatattcattgataatttcttccaacttacttttactagttaagcctaaatctttagtggtcaattttccctgatcattatatttttcacacaatctatatagatcagcatatgataagttaacttgatatttcggcggcaattgttctaacaatgtcttttccaaaccagatgcttcgagtaactcaacccctgccttcaaattaggattatctgagtcatccactactcgattgattacttctttgcccatcgcctgtgtatcgtttatttttaaattcacattgctagtcattaataaccaaaaagatactgcggctaggccgaccattatcaaacgtagtattattttgacgatgttcttcatctaaaaatcttcccctaacatctacttttttcagatggcaaacaattgcaaggcaccatgtcaggagcatccttttctttcaatttaagttcttgctgcatcgtcttaatatcgcccttagaaagcggtgcttcttttagcaactgaattaatacctcacccttgtgcatatcacacatgttttgcatcatatgtaaagtaacttcagacatcattttgcgctgactaatagtcggcttataaacaaaacaccggccttctttacgcgtctttagcaagcccttttgcactaaacgccgcattagcgttttaattgtggaatcggaccaatcctttttaccttgtagttctttgattacttggccagtacgaacttctcctaaggtccaaataatacgcataacttcccattctgattgggtaatggaattacgatcgtctttagtttctgccataaaacatcacttctaaatccaaattttttactaaagaacaaattttttcaaagcctttgcaatcccgttgtgatcattatcatcagtaacataatcagccttatctttgatctcactaatggcgttacccatcgctactttcatgaagttgggattagaaaacatcgaaagatcattgccttgatcaccaaaaatcatcacgtctttttgggcaatttttagccgtgaagccaaatccattaaagcattaccttttgaagctcccaaggcatttaattcaataatactgtcaaaactgcgaacaatgtcataagtctgaaaagcccagtcggggaaactattccacagtttttctacctggtcagctccttcagttgaagtaaaaccgactttgttaaaagtaaaatcttttggaatttcttttcggtctctaactttcataatattatcggtcaaagccgcattaatttgcatttgcacagataaatcccgatcagttgtaatgaaatacttagtcgtctcaaaatgtacatttacatgacttaaacgctgaaaacgcaacatattattgaagtcttgataattcaattcctgactcattaaaacacgaccagaaattgtttgaattactgcaccattaaagacgattgcatattgatcatcaccttcaattcctaattgcttagcaaagttcaatactcctgataatggtcgtccagtagctaaaacaaccttaatcccattttgtactgcgacacgcaacattctttgcgtttctggcaaaatagtattattgcttgataataaagttccatctaaatcaaccgcgatcaatttaatagccattttaatccctcggatcttaaaaattacatctagcattaattatacaaaaagccgtgatttaactcacgactttttacttatcgattattcaattaggattttacttacccatttccttttcgaccactttaacgatacggtctacataggcatcagtttcttcttgagttggtccttcagccattactctaagcaagtcttgagtacctgatggacgaacaagtacacgaccatttccagccatatccttttccactgcagcaatttcatcaagaattggttggtgttctttccagctcttcttgtcagcaaccggaacattaactaggcattgtgggtaatctttaaagtctttcaaaagttcacttaatgacttaccagtcttcttcattacgagcattaaatgcaaaccggttaacataccatcaccagtattatgataatcactcataataacgtgacctgattgttcgccacctagattgtagccgtgagcacgcatttcttcagaaacgtaacggtcaccaacttgggtacgaacattcttcaagccttctttttcaagagccttagtaaaaccaagattactcattacagtagtaacaatggtatctttcttcaaacgaccatgttctgccaagtatgagccgagtacgtacatgatgtggtcaccatcaacttcattaccattttcatcaacagcaatgcaacggtcagcatccccatcaaaggctaaaccaagttgagcaccttgcttaacaacttcttcttgtaacttttcagtatgcgttgcaccaacatgatcgttaatgttcaaaccatctgggtgagttgcaatagtagtaaagtcaacgccacaatcagcaaacagtcttgagatcaatgcgcttgaagcaccgttagctccatcaataactaccttaattccacccaagtcttctggaatagtattttcaataaattgcaagtatttagctgaaccttcgtggaagtcagttacagtacctaatcccttagcagatggacgaggtaatttatcttccttagcgtcaattaatttttcaatttcgccttccatttcatctgaaagcttcaaaccatcgctaccaaagaacttaatcccattatcttctacagggttgtgtgaagctgaaatttgcacccctgcatcggcgccttgtgctcgtactaagtatgaaagacctggagtagtaattacgccaacctcaagcacttcaatcccaactgaaagaaggcctgaaatcaaggcatattcaagcatttggcctgaaatacgagtatcacgagatactaataccttagcttgttcgccgtcttttttgttcttagttaaaacataaccaccatcacgacctaatttaaaagccatttctggagttaagccttgattagctacgccacgaacaccatcagttccgaaatattttaacatttaataaacaacctttctcaaattaattattcgcattctttactttaattgatatctgtacattttcaggatcaacgcgagcaactcccttaggtaaaactaaagggtaattctttacagttgaatatgagattcctttcagatctacatcaacatccaactgcttaatctttgctaatgtttccttttgtccatacagtgttacctcatcattcttggcagtaaccgaatagactttattatttttttcatttttaggctttaaatttagcttaactttctttttgaaaagcgatattggcaaactagcttttactgtagatggattaatcactgcatttaattgacgcccttttttatcttcagctatcaaaataacttgacgctcataatcatgattaatgccattaggtaaaggcaacttggcaacgatctgatcaatctgatttacttcgcttctagcaccagtaacctcaacttgctgcggatcaacactagccgtaccaatattatatccattagcaacagcatttttattatactctatttgaacgggcatggtacgagattttcgccgttcaatatcaacattaactgttgccgggttaatcgtgtaagataattgactatttagtcccgtaacttctacctttacggtttgcttacctattttcttatgagttagatcaatataagcacggaagctttgagtattaacagtcgaagtaaccaacgcattcgaaccctccaaagttatcttaaccttttcaggataaccaacaacatagtatttatctgtattaaccgaaacttgcagaggaacactaattgtctgcgtttcattagcagtttgccgtgtcttcttagattcaccctgtgtaacaaaacctgtttgagtagagtcaatgtaaaccactaataagatcgcaaacagcaatgagattattctgattacccagcgtttatcccaaaagtctttcatcgatctgcaccccatttccagactttattaatcacacgacgaatccatggaaccttcttctcttccttaggaacaagttgagcattcaaatacttcaaatattcttcacgagacaaatctactaaaaagcgcccgtttctagtaatagttacgccaccagtttcctctgagacgacgatcgttaccgcatcggtaacttcagaaataccaacggcagctctgtgacgcgtgcctaaacgcttaggaatcatgctgttatctgacagtggtaaatatgctgctgcaacagcaattcgattattattgataattaccgcaccatcgtgcaacggcgtattagggataaaaatattaattaataattcaccagaaatatccgcatccagcttgattccagtttcaatataatcatctagccccgtatcttgttgaatcgtgattaaggcaccaattcttcttttagacatgtattgaatcgctttatcgagctcctgcaccatcttaaccgactgtgtatgagcactctcacctcggccattaaaaatcggcgtgcgtcctagccgctctagtccacgacgaatttccggctggaaaataacgataattccgattactgcccaagaaacaatttggtccacaatataagttaccgcatgcagttgcagtaagccggcaataattctaacaataaagataaagacgatcccttttgccagttgtactgctttggtaccacgaatcatcatgatcaaacggtaaactaaataccaaatgattaaaatatctaaagcaatggagaaattattccaagtaaacagattagaaatattaaaatgcattgattgctcctttcttctttaattataaccgccccaatttaccgtgcatacattttaaattctaaaaataggtcattatattcttgggtcttcttaggacctaaatctctaaagacctgtagattcttcaacgtactttgagtaggataaaactgccggtcatctctaacttttttcggcaataatttttgggctgcggtatttggggttgcatatccaacatattccgcattttgcgctgcatttttaggttcaagcataaaattaataaacttaagtgcagcttttttattttgtacagttttaggaataacaaaattatcaaaccacaaatttgatccttgcttaggcacaacataatgcaagtgaggattttgttccatcatttcataagcctcaccagaccaggtaacgccaattgctgcctcattttgcactaggtacatcttcatttcatctgaaataatcgccttaatattgggtcccagactattaagcttagtttgtgccaaatgtagtttaatactagatgtggtattcattgaatatcctaaagaaaccaatgccatccccattgcatccctagctgaatcaactagtaaaatttgcctgcgatactttttactccacaggtcattccaagtcttaattgcccctggcttgacgaatttatcattataaacaattcctagtgtcccccagaaatatggcacagaataatcattattttgatcaaatgacttatgtaaaaaactcttgccaatatatttcaaattaggaatttgcttttgatccaactgatcaagcaaatgagccttgcgcattttagttaccatatactcagaaggaatggtcaaatcatatgccgttccgccttgtttgattttggtatacatcgcttcattggaatcaaaggtctcatagacaacatgataacctgtctgcttttcaaacttttttattaactttggatctagatagtcgccccagttatagataatcaagttttgtttatttttcccggtagacgatttctccaaatgatgggataaaccccaaaggcctgcacaggcaattaaaatagctgcaattgccatcataatctttttcatttaactaggcctcccatcacacgatgatttttctttctgccctttttagtagtaataaaataatagattcctacaagcaacaagacaaaaatgaacattacggtacttaaagcattaatctcaagatcgattccttgtcgtgcccgagaataaatttcaactgaaagagttgaaaaaccattcccagtaacgaaaaaagttacggcaaaatcatctagtgaataggtcaacgccataaataaaccggaaaagatgcctggcataataactggaattaaaacatcactaaaaacctgccatgaattcgcccctaaatcacgtgctgcatcaataagcgacatatccatttcattaagtcgcggcaagaccatcaaaaccacaatcggaatagaaaaggcaatatgacttaacaatacagaaccaaaatttaagccaattcccaatgctgtaaaaaagatcaaaaaactagcaccaataattacatcaggtgacaccatcaagacattgtttaatgctaaggttgttttcttattagattcttttttcatcgcagcaattgcaattgcaccaaatgtcccaataattgttgctattaaactggacaacagcgctagtaggatagtttccaaaaatatcgctaataagcgattatcttgaaataaagtctgataatgagcccatgtaaagtgctcaaatttattcatgtttttaccactagaaaatgaaaagtaaatcaaataaaaaatgggtacatataataggatcaaagtaaaagcaagatagatcttagcgattaaatgtctgtttctcataaatctaccttctttcttctagcctttttgctagtaatcaacatgactaccaccatcagcgcgattaaaattactccaattgtggcccccatattccagttcattgtggtcataaaatactcttcgatagcagtccctaatgtgattacccgattgccgccgatcagccttgttaacataaataatgacaatgatgggataaagatggcctgaacgccgctttcaactcctggacgagaaagcggccataaaacatagcgaaaagtttgccatttactagcacccaaatcctcagaggcatgaatgactgcaggattaatctctttaatcgcattaaaaattggcaaaatcataaacggaatttcaatgtaagtcgccacaaaaataaaagcaaaatcagtaaacaaaatatttacgggaccaataccaaataaatgtaaaaatttatttactaaaccgtcattacctaaaatgccaataaatgcatatgctttaagcagcaaattaatccatgttggcaaaatgatcaataacagccacagctgctggtttttcattttaattaaaaaatacgctgccggatacgaaattaccaacgtcaacaaggtgatcaaaaatgcataccaaaatgagttaagcatcatttttaaaaaggtaccatttttaaaaaattcaacgtaatttctgagcgtgaatgcgttattactatcagtaaacgaataccagagaatcaataaaatcggcaaaatgacaaagagaataatccacagcagatatggaatcataaaaaacatctttttatttttcattttcatctgcctcatacttttctagtcgagcatcaaaatcgtgttggctttcatttaaccgcatgacgtgaatatcttctggatcaaaaaagagcccaacacgttgtcccaatttaactccattagtagaatggatcagccattcattttcattggcatcaattgccttaatctcaaagtgatcacctaaaaataattgcgtctgtgctgtaaccacaatcttcccatcttctggtttaacaatatccaagtcttcgggacgaataactacttcaaccttttcattaggcttcatcccaccatcggcacatttaaatttattattagcaaattccacttcgtaatcatgaatcattcgaccagataaaatattggagtcaccaataaaacgtgctacaaagtcattcactggctcatcgtaaattgctaccggattaccactttgttgaatctgcccatcatttaaaacaaaaatttcatcactcattgatagagcttcttcttgatcgtgcgtaacaaaaataaaggtaatgcctagctttttctgaattgcccgtaattcaaattgcatgtcttttcgtaaacgtttatccaaagcagatagcgactcatctaatagtaaaaccttaggttcattaacaattgcccgggcaatagctacacgctgctgctgtcctccactaagttccgaaatttcgcggttagcgtaaccgtctagacgaaccatatgcaaagcatctttaacagctggcttgatttcactcattggtcttttcttaattttcaagccaaacgccacattttgaaaaacatccaggtgtggaaacaaagcataattttgaaaaactgtattgatatgtctttttgaagcatcaaggtcagtaatatcattaccatcaaagaggacttgaccactagatggctgagtaaagccagcaataattcgcaaaattgtcgattttcccgagccactaggaccaagtagtgaataaaatttaccagattcaatagttaaatttatatcttttaatgctacaaacccatcatcatattttttggtgatgtgttttagtttgataatatccatttccatccctcacataaaaaacagctgcaagccttccagcctgtagcttgtctttgctaaaatattttacttttctttgccgataatcctaacttctgtgcgtaagtcaatgtcaaacttttctttaattaccttttggatcaaatgaattaaattcaaataatctgttgcagtagcaccgcctttattcacgataaaacctgcatgtttcattgaatcttgagcgccaccgatttgtttaccttgtaaaccagctttaataatcatcggaccaacaaagtgcccagtaggccgcttaaagacactgccacaagatggatattcaagtggctgcttataacgacgtaaagcatttaaataatgcatatgatctaagatctctaacttatcgcctgacttgagtgcaaaagtggcgcttaatacaatatcgccattttcttgaactaatgaatgccggtaagaaaagttcatttctgcgtttgaatatgttttaaattctcctgctctggttaaaacattaacgctttgcactacttcttgcatctcaccgccataggcaccagcattcataaaaataccaccgccaatactaccaggaattccagcagcaaattccattccgctcaaaccatgatgagcagccgcaaaagctgtatcgataatccgtgcaccagcatcagctgtaacttgattatcttctactttaatctcttttaattcagtcaaaataattactaacccatcaattccgccgtcacggatgattaaatttgaggcattgccaataattgttaatggaatttcattttcacgtgtgacttttactaattgttctacttcatcagtcgtcttaggaaaggccaaatattcagctggtccacctgtcttagtaaaagtatatctgcttaatgggatttgctctttaatatcaatccctttttctttcaaatcaagtaattccacgctgttgcctccttaaagtttcttgttttattttaccgcataaaggcgttagcttcattaatattaatgatatacttttttaaaaggagaattttatgaattttattgcaatggactttgaaacagccaaccattatccagaaagtgcctgttcacttgctttggtaatggtgagaaataataaaattgttgatcgcttttatacagtaattaatcctcaaatgccatttgacgcgcgaaatattcaagtacatcaaattacagctgaggacgttaaaaacgctccaacaatggcagaggtctggccccacattaaagaattgtatcaaccaggaatgcttgtagccgcacataacgctcgctttgatactaatgtcatgcggcaaagcctggcacgttacggtattgaggagccccactatttggtcattgacactttagctagcagtaaattactcgaaccagaactgcctgaccacaaattagacacagtttctgaggccttaaacgttgaattgtggcaccaccataacgcattaagtgatagtgaagcatgtgctgggattttaatcaagcaagaagagcaatttggtgatgaagcaatcaaaaatttggtttatcagatatgaaaaatctctaggaattttgatcctagagatttttgctttacttattaaattcagttaacgcagctttgacccattcttcattgcgcttaccatgaggagtaaattcaacaacccgtttagttgaatcccaactatcgtccactctggtaatcgtaagttgcaaatactcatctggcaaatcattcattactagttgtggccattcaattaccactaaacctggttctgctaaatagccctccaaatcaatcgaggataaatcatcattttccaaacgataaaagtccatatgaaagagcggcaacttagcttctcgatattcacgcacaatggtgaatgtaggactcttaacaggccgatgtatgcctaatgctcgccctaatccttgagtcatggttgtcttgcctgcacccaaatcaccatttaatagtaataaatcgtagggctgggccgttttggctagggatgcacctaatttctgcattccatcagcagaattaatttctaactttgtcattacttttcatcctttgctaaagcttgtgcggcagtaacaattgctaaatcataaatatcttgttcactgcagcctcgagataggtcattcactggagctgctaaaccttgcaaaattggaccaacagcagtgaagccacctaatctttgaaccatcttataaccgatattgcctgattgtaattctgggaaaacaaagacattcgcatgtccagctacctttgagtttggagccttcttttcactaactgcaggtacaaaagcggcatcaaattgcaattcaccatcagctggaatttctggatgatccttttggaacatagctgctgcatcatgtaccttatcaaccattggtccttcggctgaacccttagttgaaaagctcaaaaatgcgaccttaggatcaatttcggccatcttggcagtcagagcagattgatagccaatttcagctaaagtttcttcatcaggattaatgttgatggcacagtcggcaaaaatgtaacgctcatcgcccttttccattacgaaagcgccggatactcgatgcatccccttagctgcatgaattaattgtaaagctggcaaaacagtgttagccgttgagtgagcagcaccggaaaccataccgtctgcttttcccatcttcaccaacatggtaccaaagtaattaccttgggctaacttgagctttgcttcagcaatactggtatcttttcgtctagctttaacaaattccgctgccatttgatcaagttcatcataatgattgaggtcatagatcttaacaccagctaagtctaaattattttctttaactaacttagcaatctcatctggatttccaattaaaattggttcgataatgccatcttttttcaaattagctatggcagtaagaattcttaaatcatcgccttctggaaaaacaattcttttcttatcttttgctgcttcaacttgttttttgaataatgaaaatacgctcattttttacctcttatgctaaatcagatttacttatcgtttctggcaattgccagtcaatcggcgtttcatcaaagttcttcaatgccatattacaccgcgaaaacggtcgcgagccaaagaaccctcgatcagccgaaaatggacttggatgtgatgatttaatgataaaattcttactttgatcaattaatggaatcttgttttgagcaaatcgaccccacaaaataaagacgacttttccacgctcactcagagccttaattgcagtatcagtcacatcttcccaacctttgccttggtgaccgttagcatgcccatacggtaccgtcaaaaccgcattcagcaaaagcacaccttgatcggcccacttttttaagtaaccgtgattaacaggccgagctccgacatcatcatagagttccttatagatatttttaagtgatggcggcaaagttgtacctggcatgacggaaaaactcattccattagcttgaccaggattatgatatggatcttgacccaaaattaccactttagttttagcaaacggtgttaatttaaaagccgtaaaaatatgatacatatcaggataaatttgtttagtagaatattcttcttttaaaaaattatgcaattcgtgatatttctcacttgcaaaaacaggatccaatacttgatcccaatcgttgccaattaattctttagccaagtcttacaccctcttttcttctcctctttatggtatcattaatttaatactaaatgggagagaaattatgatcaaattagttgcttgtgatcttgacggcacgttgtttaattcagagatggctgtttctgctgctaatgcaaaagctgtgaaaaatgcacaaagtagcggcattgaatttttaattgcgactggccgggccccacgcgaatcacgttcagttctcaaagatgctgatttgcataccagttttatcaatcttaatggtgccctggtttttgacgaaaatgagcaattaatgatcaaacacagtattcccaaggcaaaagcacaacagctagtgcatttactacatcgatcaggcttttactttgaaattttaactgccaatcaggtttatagtgaaaatctagatcaacgtatttcaaatgtagctcatttaatggtagatctaaatcctctacttgattttcgtcaagctgtagcaatttctgctggtaataagactattatgaatatgaaacaaatccacagtttcgataatttattgcaagatcctaaaatagaagtaatgaaaattattgcttttgactctcggggacatgaagcttttaccgatatcaaaaaagaaatcgctacaatgggcgatctagtagtaacttcaagttcatcttctaatattgaaatcaatgagcaacatgctcaaaaaggtcttgccttacttgattatgccaagttaaaaggtatcgagcctgaggaaatcgctgcaatcggtgataatttaaatgatgagagtatgatccgagcagcaggtactggcgttgcgatgggtaatgcgattccagctattaagaaaatagctcaggtagtcaccaagcgaaacaatgaagatggagtagcttatattttaaataaatttattgcagataataacaatatttaaagttatgaggtgagtaagtatgcgattttggctagaacttaatcaggaaaaggattacggtcaaattcctgtgcttaatcaaaatggaaaagctgaattttttattcaaggcaatcttgataatccaaaccacactttatatctaaataatttccgtaaacaggaagtgggacgtctgttttctgatggtgcgggcctaattgcttcgttcacaattgatgtcgtcaaccactctttagtaggcgtaaaaaagttaaacacacctactgcaaacatattctatttgacccaattaaagtatattgttacaggtagtattaaacgtggtacttatacttttcgttctggaatcaagagtgtagcaagtgtccaaacaatcatgggagatcgcggaggcgttttaatttgtgatattactaagcctgaagacgtcccctttattcttttgacatccgttctatttacacaatggcatgttacgcctttgaaactgcctagttttccgccaattggatttgaggtaaatccaaattaaacaaaaaagcagtcatgaaaattttcataactgctcttctagaaagtgatatagatatagatgtatcttctgccataaagtttatatttattaagtaataaggaattattaggcagagactgaataatgaaagttaaatctaatttgattcaacctccatagcttattatacttcgttcagccaaaaatacaagggctagatgttattattttactttaaagatagctaaataatgcatttagagctagcttatagcttaataatttgttatttaacttagtacatctatttttctaaacaagacaactttaatttctacgtaaattgcaataataaattgaacacttttaatcaagctgcttgatagattagatctaattctctttcaaagatttcatctggtgtatgatatgccaatatctttcttggtaaagagttgcaccaggtttcaatgtctatgatgtcttgtagtgaataattgtctattgcctctcccttaggaataaatctgcgaatgagtccattatgtctttcaacggttcccttgtcacaagatgtataaggatgagcatagtaaactaaagtatttgatacgtcttctaagcttgaaagatctgcaaactctgagccattatcagtggtaatggttttaaaaatatcattccaatgttcgctgtattgcctttggagttctttaaaggcctgcatgacactgacagaagtcttgtcaggaatacgaagaattaagaactcacgactcatacgttcagataaggttagcagcacctcatcatctttgctcttatgtccgagaactaaatcgcattcccaatggccaaactcattacgtttattgatttctttaggacgttcttcaatgcttctgccaagttttttcttatttctgcgaatacgatgaagcttggtattgcgtttaagcttctctggcaagtcgtaattatgtatatctaatagaccttggtcgacataattgtaaagagtcttagtacagacaacatctctgctgctaaatgcgccaacagcggtggcgcgattactgcacacatcaagcgaccagccgtctttaaagaaatgtttgtggacatagcgcatgaattgagttttcctgagaaagtctgatttacgtccacaatttttacgatgagcttgatatgcatcatgcccttgagtagccttatatcttttgactttgccatgatacagttctacagtaccgcgcttaacctcataactgatagtagaaggggaacagtttaattcacgggcaatggcacgcaaagaatagccatctttcaaacgcaattgaataataactctttcctcgaatgataaatgcttgcctttaatgtgatgattcatggtagaatgtaaagagtccattttgacctcgtttctaaatgttgtgtggtaactacattctatcaaacaggtccgaatggactttttattttttattaagtgttcaatttaattttacaatcagcgactttaatttctattaaaaaatatagtgaaatgatcaagtgatttatcaatggcttgatcatttttatttactttatcaacgaacttgtttttagctatcaaactatataaaaaagagccaaatctaatgatttgaccctaaaaattctagattattaatctaaattattttttatgaattagtcttggtagtttaccaattctaagaatgattctggtactaatgaagcaccaccaaccaagccaccgtcaatatcaggcttagccattaattccttaacgttagctggttttacagaaccaccgtattgaatacgaacgttttctgcagtttcttcgttgtacaagtccttaacagtttcacgaatagtcttgcacatttcttcagcttgatctgatgaagcagtcttaccagtaccgatagcccagattggttcgtaggcaataacaagtgaagatacttgttcagcagttaagccgtctaaagcagccttaatttgagcaactacccagtcttcttgcttgttagcttcacgagtttcaagtgattcaccacagcaaatgattggcttcaagccattagcaaagattgccttagccttcttgttaatgtcttcgtcagtttcgtggaagtaaccacgacgttctgagtgaccaataattacgtagtccatacccatttctttcaagaccttaggtgaagtttcaccagtgtaagcaccttcgtcttcaaagtaacagttttctgcaccgatatgtaagtttgagccttcagcagcttttctcaaagcgtcaaggtcaactgcaggtgcacaaataagtgattcaaccttacttgggtctggtaacttatccttaacagcgttaacgaattcagtagtttgttctggattcatatgtaacttccagttaccagcaataattggtgtacgactcattaatctattgtcctttccttactattacttgtctgaaacgcaagcgatacctggcaattccttaccttcaaggtagttaagtgaagcaccaccaccggtagaaatgtgggtaatcttaggagcaatgcctaattgcttagcagcagcagttgagtcaccaccaccgatgatagtagttgcatccttaaggtctgccaatgcacgaccaacttccaaagtaccttcagcgaagttaggcatttcgaatgcacccattgggccgttccaaacaacagtcttagcatccttcaagatttccttgaacttttcaacagtcttaggaccgatgtcaagacccatcatgttgtcaggaatatcatcaccaacaacttcacgtgaagcatcatttgagaattcagttgcggctacgttatctacaggaagaacgatcttgtcgccagccttagcaagtaattccttagcaaggtctaccttgtcagcttcaaataatgatttaccaatgctgtggccttgagctgctaagaatgtgtaagccataccaccaccgattaaaatatggtctgacttaggaattaagttttcgataacaccaatcttgtctgaaaccttagcaccaccaagaatagttacgaatgggtgtactgggttttcaacagcatcacctaagaacttgatttccttttcaagcaagtaaccagctgctgcaggcttgccagcttccttcatagcagttgcgataccaacgtttgaagcgtgacttctgtgagcagtaccaaatgcatcatttacaaacatgtcgccaagacttgcccagtattcgccaagcttaggatcgttacctgattcacgcttaccaaagtcgttgtcgatgtcttggaatctagtgttttcaagaacgataacatctccatccttcatgttgttgatagcgtcttcaacttctttaccttcgtttgatggtacaaaagttacaggcttcttaagaagttcacttaaacgttcagcaactggctttaatgataattccttcttgtcagcatctgacttaacacgacctaagtggctaagtaagatagccttgccaccgtgttcaatgatgtacttaatagttggaagtgcagcaacgatacggttgtcgtcaccaataacgccatccttaattggaacgttaaagtctacacgtactaagacctttttgcctttaacatcaagatcgtcaacgattaatttagccattataatcctccgattattttgatattttttcttcaaaaaaaggcggaaggaagaatctccctccgccttctcaattaccacttaactatataatcagttaattaaaattaatgattaaagagttgcaaagtgtaataaagtacgtaccatttggcaagtgaatgagtattcgttgtcgtaccaagcaacagtcttaactaattgcttgtcacctgcagtggttaccatagtttgagttgggtcaaagattgaaccagcagtcatgttaagaacatcgctagaaacaatgtggtcaccgttgtaagcaaatgatgggctttcgtacttcttcatagcttcgttaacttcgtcagcagtaaccttcttgctcaagattgataccaattcagtttctgaaccatctggaactggaacacgttgtgcgtgaccgttcatcttaccgttcaagttaggcaataccaagccgatagccttagctgaaccagtagtatgaggaatgatgttttcagcagcagcacgagcgtcttgttccttaccactacgtgaaggaccatccaaagtcatttgagtaccagtgtatgcgtggatagtagtcatagtagcaacttcgataccgaattccttgtccaaagcgttagccattggtgcaagtgagttagtagtacatgaagcagctgaaacaatcttgtcatcagcagtcaaagtgtcttcgtttactgagtaaacgatagtcttcaagtcgttaccagctggagctgagatcaatacacgcttagcacctgcatcgatgtgagcttgtgacttagccttgctagtgtagaaaccagtacattcaagaacgaagtcaacaccatcgttcttaacccatggaatgttttgtgcttgtggttctgcgtatacgtggtaactcttaccgtcaactacgattgaatcttcagttgatgaaacttcgtggttgaaagtaccatgagtagtgtcgtacttaagcaagtaagcaagcattgctggagtagtcaagtcgttgatagcaacaacttcaatgtcctttgacttttcgccaaggtccataatacgacggaatgctaaacgaccgatacggccgaaaccgttaataccaattttaactgtcataacctaaagtcctccttaagaactataaacaacatttattttaaacgggatttcatttcccctttaaaatcatatttgaggcgccctcatcagtgattagccaggtttgatgaggcgcattaggcatataagctttaattgcttgagcctttcgggcaccacaagcaaaagcaaatatgtggggtattttgtataggttctcgaactgcaatccaacctgggtgatgcggtcaacaaccttgccatgttcatcgaagaaacacccgaaacattcggtgacggctctcttctcacgaagttcagatagcttaattgaattatagcctctgcgctgtgccatttcttgagctaacccaataccatgaatcacagcatcactttgagaaatgtcttgcagaacatctgcgatcgaggactcacgaatcaaagatttgtaagcatcatctgaaacctgctcaggtaaatataatgtcttataagtacctgaagtcttagcagccatttcttggacgattgtattactttgcgtctctacattttcgcccaaagctcctcgacctggaacaaattccaactggcgattgttagctaaatctggtgataaatacttagcagatctagctaacgccgctccacctagaattgtaactattgaatggcctaaaggcaagagtaaattcaaagctgaacttaatttttctcccatctcctcatatactcggtcttggaaatccgcattaccagggacgatcaatgttctttcaatccctaattttttggctaatgctacttccgtttcaccggcattaaagaggcgatcaagcaatggtcctgcatcttttaatgttttctcacccttttcagttaaaaacatcccaaaactttttgtttcaatcaatcctaattgacataagtactcagtctcagttctgatgtttctctctgaaagccctaaatgctgagcaacactccggcgtccaattggcgcatgtagcgaaatctgctcaaggacaagatacctttgtcgaagaatctttaagacgtcgggaacgagcgcttcgagcaaagaaaagtccgaatccatcgttccctcctttccatgggacatctatcgaccacctacgtgtcgttttgtgtcccagaatgcttaaaaatataagagaaacgtacttttcattcaattcatacatttcccaatcgacactgttagtataacaatgtatttttcgtaattcaagaaaaagatacacgattttaaaaaagtcgtaaatcgagtaaaatcatttttatttcattactttttttgatatactaccacttgtgaatcatctgggtccttagtgtaatggatcgcacataagattccggttcttagaatctgggttcgactcccagggggcccatataactacatgttgaagactaccgccatctcggtattcttcttttttataccaaaaaagcattcctcacggaatgcctttttcaatatcacaattatttagtgcttgtagtcatcaactcagcacgttgtgctaactcagtgtacaaagttgagcctgaaacagataaaccttcaatttcacggcgagtgttgaaatgatggctaccattataagtaccatttgctgctacacggaagatgtagtcgttaaaaccaatatagaattgattgtggttgctgtcataagcaaaaccttgaactggtgaaccagttacgaaattactttgagtagcaccgatttcttctggagcccaagtgtcaccatttctagttaacttccagtattcatattggtgacgaccaccattgtggaacaatgcatacatagtgttgtcgccaacaaaggttgcattatggaagtaacgaggatatgcactgctgccgttccaggtcttaacagtccagattttgttaatcttcatatcactctttcttacttgcataatttcttctgaagctgttgaattagcagtcttattgttattagccaaaacataaatgtagcttgaagaagagccaagtgattgaccatgacctagcttaatgtatggtgaaactttaatattgtttgcgtagcttctaaaagtgctccatcccatagtagttaagttttgagcagcatatttactcttaattgcattcaagttgtaagaaacaagatgtcctcttgagtcgctactgctagtgtacatagaagctgtaaaaataccatcattaacagtaataccttcaggaattaccccaacttgtcccattgcatcagcagcttgaccatagcctaagctgacaaaacgtggttggaacaaacgagtgcgcaaagtcatgccgttacctgaatagctatttgagctagtttctgaacgataaccgtgtgcctgattccaatttcttgatgatccctttgagccaccattccaagtatgaactgccttaggaccactcttaacagaagcacctgcactagtaattccttcatttgtatctgaacgaacagttacattaacgcttgcctttgccttaccatatgaataatctaccttagtagtgccggcacggcttgaactaacagagctatgtgaaacattaaccctatctggattaattgcagtaccttgtccatctgttgcatagttaattgcatccctagttggaaaactgtagttgctgttgtgaactaagctaacatcttgagctactgaaatttggtttctagcaaaaaagttttgacttacccaacccacattgcgtccatcgacaataatgtaccagaagttacctttcttggtagaaacatacttcttagattggatttgactatgcttaaagtacttggtatttgaaaatgcacctgatggtccttttttagatacattatgataaatagcgtaattaccattgccagcaatcttagtaactgccttgctgtagcttttggcatctaccttgctttgactaatggcaaaaacaccaccaactaatgcagcactggccacaaaagttaataacatctttttcccttttaacatccttattaatcctcccatatgaaaaaatcacgttcattttagcacaaatttatcaaatgaaacatctaattattaaaaaatttcctgaacaacaagactttgaaaacgcttctgttatataattaaaaagttcacataaatatataaatagtaatagggagaaattttatggtcgaatcacaaaataattccaaaaagatgatgtggaccaccctagcaatgatggccttctctaccgtgtggggctttggtaacgttgttaatgggtacgtctactttgacgggacaaaggttgtctttagctggatcgtcatgttccttctctactttgttccttatgccttaatggttggtgaacttggagctaccttcaagaatgctgaaggtggggtttcctcttgggtaaatgccactatgggcgcaaaatgggcctactacgcaggttggacctactgggcttgccacgttgtttatatttccagtaaaggtactggtggtttaagagcgatggcctggggtatcttcggaaatacaaaatggtatgatggcttacctaccgcttggacacaatttgctacattagtagtcttcttgcttttctgttgggttgcaagtcgtggtattccagtattgaaaggcctagcaacaattgctggttcttcaatgtttatcatgtcaatcttattcatcattatgatgtttgccgcaccagctattaatccttctgctggtttccacagtattgactttaactggaagaatttgatgccaaccttcaacgtaaaatactttacttctctttcaatcctagtatttgccgttggtggttgtgaaaagatctccccttatgttaataaggttaaggatccttccaaaaacttccctaaggctatgatggctttagcaatcatggttatggtatctgctattttaggtacttttgccatggcattaatgtttgaccctaaggtggttaatgccaactttaacgaatacatctctaatggtgcctacatggcatttgacaagctgggcgaatattaccatgttggcggcttgttcatgtacatctattcatggtgtaacgtaatcggtcaattctcaacattagtaatcagtattgatgcaccacttagaatgcttttgggtagtaaagaagctaaagaatttattccaaagggcttattaaaactcaacaagcatggtgcttacatcaacggtatctggatggttgttgtcctctctggtggcttaattgctattcaagctttagtaccaaatgctcaagctgttatggcacaattagttaaattaaattcaactactatgccacttcgttacctttgggtatttgcggcatatgttgctttaagaaaacagcagcaaaagttcaacactacttatcaaatgactaaacatcaaggcttagcctatactgccggtatttggtgttttgtagttactgctgcatgttgtatcttgggtatttactcaccagatccatttaccttattccttaatatcttgacgccaatcgtcttgattgcattaggtttaattttgccaggaattaagaaatatcaagaagcaaaggcaaaataaaatttaaatacagaattttaaaaaggaagcaatttcaaaagactgcttcctttttagtgtatatttttatttattagcccaagcatttaccaatgccttgtacttggcaacgctaattcctgcacctttactgcttcctaaatatgaatcagcatttccataaccagtattgcttacattggcaaagcccattactctataatttctgttaatcaaattcaaatagtgtcctgccattttatagccgttcgtgccctctacggccgcatcataagttgccgtccaagttggactatacttcgccggcttcaacgaatgattcttttttacatcataattccaacttttcttttcagagaaccaagtatcaaccggatctaaacccacactttgagtagcgatgttttccaaaccaatcgacttgaaataatgagtatgctttaagccaccacgtttttgatagtcagcatttaacattgaggctgctgtcaaaagtggtgacacctttaatgaccgaaccccttcacttctacgtgctctattgacactattcaaataaggcaatacagctttaatattcttagcactagttgcatcatcatttgaatgcaagtcaacgtattcattgtaccaacttgccttaggctttttacctaagcgacctgttttcaataatttcactgctgatctagcggaactcctttgccctttagtcaaagatttgtttttagatagatatgtcataaaatcaacggcatttttggctgccttaactggcttggaattcaatgcagttaatgacaaggtcaccatcacagcagaagcacctgcaattaaaaatcgtttcttcattctttttctcccatattaatatatgtgaactacgatttaattgtagcacatacactaatggaagattttccttttaaattgcattattattcatctttaccattccgctttttaatctgacgattaattttttgaatatctttttcttgcgtcaatctaatcacaatccaaattatgatatatacaaaaatgaagatacctaaagtttgccaatctataagccaatgattaaaaagcatcataatagaaaacaacgtaaatgtaccaattaaatgtaacaacaacgcaactaaatatgacaggttagtataaaaaagaaaactcaattccccaatcaaaccactacaaatgaaaacaacaattacgctcattaatgggatattaattgcacctacactatttgatactattcctaaaataagcaagcaagtaattgcaccaaatcccattccagttacacaaaaatctaaaactttatgccaaattttcattttataatcccagtttcttttctaatttaggtaaatatcttcttgaaacatcagtcttctgtttaaaagctagttttgcaatcatattgcccgtaaatcctgcctcgagtgcttcaagataattcaaattaataatcccatattttgatacctgtacaaagtcattatttaatttctctagaacttgatataagcgacctgtagttttaatgacagcacttttggtataaaaagttaattctgttttttcaacctcgactttgataatttcttcaattttaatagttaaaatccgatcttcagtttttaccggcagaattgaatctacctttttaccaaaatcttgaatataagccaataaattttttacttctgctgtttcctctaaagaaattactttgatcttaatttgatcttttttcaaattagaatctgactgaaattctacattcacgtgttaattcttctttctatcaagcatgactgcgagacatattactataactgtcaataagagtgacatagctattattaccaatgcattatccccgttagttaattgatgagacccaaatttaaaatgaatccctaaatactcaatcaatttttgacgcatttcatctggaacatcttcctgacttaatttatttaagagcaagcttctaaaacttgccgcttcataactacttggaaacaattttactatattttgcgcagtttttgataaagttccataaggcatgtaagttgcaaccataaatccagctgctgctccaattaccgccgacaaacgactaaacgttgttgaagaattgataaataaaacgataactaagtttaataaagttgcgccaattgcacctaataacataaaacctaatgctggcaaatatacagtcgattgaatattcaccttatcaaccactgaaaaataaattgccatcaccaaaaaggtaataacctgcatcaagaaacttattattaatgctgaagctacgtaggccatgcattcactaattggagttaaattcgttagctttatatcatcaattgctcggctttccctatccttcaccatttgaccaagtgcttgaaacgaagtagtaatgcctgcaattgaaacaataccgccaagcatccagaggtccaataattgttttgcatgactaacgttttgccaagaatcaacaagattttgttgtaaaaatccaatataaatcacaaatgaaattagtgcaccaaaacatgacattactacacctggtttattagcaaaataaattttgatatttctcttcattaaggcgaacattattgaagctcctttccagcaatcttgataaatgcatcatcaattgacccttttcgatattcaaatgtatcaatcttatcttcaaacttatgtaaaaggtctatgacctgattactattaagcccatcgatttcaatttgatcatctgacttagaaatttgtttaaaattagtagaaaaagtttgcccttgttttaggcaaattagcagccgactgggtgcatacatctctttaatttcttctgcagagccttctgctaagacattgccattttccaaaatatacatctgatcagcattttcagcttcctctaaatagtgtgttgtcaagaaaatagtcaacccctgttctttttgaagcttttgcaataagtcccagataacaattctcgtttgtaaatctaaccccgcagttggttcatctaaaaataagatatctggatgatcaattaacgctctagcaatatccactcttcttttttgtccaccagacaaagtaccgtatttttgattgaggaaacttctaataccaatcaacccaatcaatttttctaaccactctttagaaaaagttttgtacatccttgcccttaaatatagattctctttgacagtcaatacatcatctaaaacactattctgaaagactactccgatttttagatccttagcatacgtgatagtgccactagttggtttcaataggccaattagtatgttgatagtagtagatttacctgcaccattcgtacctaaataagctaccaactgtccacgattaatcttcaaattgaccttgttcaaggctaacttcttaccatattttttagttagattaaaagtttcaattaacataaaaagacttcctttctgaattcataatcagaatacagaaaagaagcctttttgtacttaaacctcaaataagtggttcatttttacacacaaggtgcaaaatagctaaatcaaaattgcattattcatctatcttaacgtattgtcctttttcatctacaacacctttgaaatggtgcatgctgccatcttcggcctgaaattcacctaagtcaatttccccatagccctttgtagaatcagtaaccttaacatcatcaaaagtttctctgaaaaattgatgaacaattctactcttcaaccgtatatcctttgaatgctcaaaggctgcagacaacgtaaagccctcatctaattgttccttgataaaaacaattagatacaaggtcgctaaattatagcggcgcacaccactttgatcatctgaaatcggcttaatgtagcccttagtttcccaatagcgcaattgcctttgcgaaacaccagtcaatttactaacttcaccgattccaatttctaaattttgaaaaatgtcatgcataatttttttagatttcatcctgataccaccttacagtatagttatattttatatattgttgttatcttttgcaacacttgtgttaatttatctaacttatttgtaagattatttgacaatggcaaattttaagcctatagtttttatagttaacttttataagagaaaggaatattacatgaacaagcaaccaacggatattcatggaaaagcttataatcgaaacctactagttttagttttaattataggttctttctgtactgtattaaacggaacactgctttcaacagcgcttccttcaattatgcgttcatttaacatcagcaccgcaactgctgaatggctttcaacagcctttctgttagttaatggtgttatgatcccaatttctgcatggctaatcaatcgcttcggttcaagaaaaatgtatttgtcagccatgtcaatcttctttattggaacagtgatcgccgcaattgcacccaattttggcaccctgcttgttggaagaatcattcagggattaggcgtcggcgttactatgccacttttacaaacaattatgctttccatcttcccagctaataaacgtggtgcagcaatgggaactgtcgggattgttattggcttagcaccggcaattggaccaacattatctggttggattgttgataacctttcttggcgttatcttttcagcatcattgccccaattgcgggaatagtaattatcttagctttctttttaattaaagatgttttaccaactaagaaagaaaaaattgatgtttggtcagtaacaacctctactctaggcttcggaagtctgttgtatggtttttcagaagctggtaacaaaggctggaccaatcccgagattttaggatttattggatttggaattatatttgtaatcctattcggtatccgccaattgaaaatggatgacccatttttggacattaccgtttttaaacactttgaattttcactggcagctgccttaagtggtatcaccaacttagcgatggtcggcattgaaatggttttaccattatatattcaaaatttgcgtggcgtttctgccttccattcaggtttaatgttactacctggtgcattgatgattggtattatgtcgccaattactggccgtttattcgacaaatatggtgcacgtaaaatggcaattactggtatgactttgttgaccattgggactattccattcgtctttttaactgaacaaagttcatacacgatgattatcattctttacgcaatcagaatggtcggtgtagctttggtaatgatgaatgttactacatctggtatgaattctttaccattaaacaagatttctcacggtactgctgttaacaacactttcagacaggtattaagttcaattggtactgcaattttggtatctgttttaactacaactaccaataataatatgcctggtaaaagtttacttcatgcactgccacttgaatacaagactagagcaatcagtgcaactttagacggttttcatgcttcatttgcaatgagtatcctcttctcattaatcacattagttcttgcattcttcttaaagaagggcaatcgagcacgtgaacatcaagaaaaggtggatggttaaatgatacttttaattctaatcgtagctgcaattatgtttatttactttaatatcatccctggaaaaaggcatacttctattgcatggctatcattaatcgtaacaattctttgtgttgttggcattgtagaacatgattataatcactggggaatgaaaactgaaacaactttaagcactaatactctagtttccagtgctactcctcgcctgccaattttgctttatcagcctttaggtaatggaactgaaaaagtttacctttataaaactggtcagcttcaaaagaagccaaaatctattaaattagataaagtatcgacaaaagtaaaacgaagcagccaaccaaaagtaatgattaagactactcgctacacctatagcaatacctttaatcaaataatgtttggcgtctttggtcatgacaaggagttaaaacacagagaatatattttttctattccctccaactggaaagtaatgtcagttaacgatgccaagcagttgcaaaaacaaatgatgaaaaaacagcagtttttaaaacaaaaatcagcccaataaaataatgaagctcaaactttgatcatgatatgaaccccgaaattcggacatgaatttcggggtttttatttatggctaaattatctaaacatgacaaaattgatatttacaatagctagaaaaattaaattcattttaactcaaattttaccatatgatttaagttaacttaaatcacctttacaaacgcttatgaaatataatttaactaaatctaaatgtagaaaattatttttatcatactgcctatttcaattgcatcctatcattaaagtaatttttataagccaaatagccactaatcacggctccaaggccagtggcagaaagcaacataaatgtaatcataatctgatacttaattgcataaatgggatttacaccagcaaaaattaagccggacatcattcctggcaaatttactaatcctacagttttagccgaatctatcgtaggctgcatcgcagtcttaatgctccttcttaaaattggcatcgatgcagttttaatatcactacccaaagccaacttttctaaaacttgttgatgcagatcattaaagctatcattcaacgctttatagcataagccaactgccaccatttcatttccagcaatcatccccgtaatgggaatgacctgcatagggactggtttaattacgccagaaaaaatcagaattcctaatgtcacgtaagtccctaccgcttcggctattatcgaattccaaatattccgccccggattaggatcacgctgattagcattccaagatgcattaaaaattatcacaatagttgaaaccaaagttagccacaaggcattaacatgaaaaataaacttcaaaacgtagccgattacgactaactgaattatcgccctaatcacgctaattaaaatatccttggttagtcctaatttttctttcacagaaattccaatggaaactaacaccagtgcaaaagctaatactaacgaccagttgctaactacaacatttttcattcgattattccgcctttttttactcttaaaatattacttgcttcatcaatttcactttgatcatgtgtaacttgaataattgtcacgcctttctcagaaacatccttaatcaaattatgtacaatatctttactttgattatcaagcccggtagttacttcatctaagagcaatatctttggtaaaaatattatgtttcgaattaacgcaactctttgcttttcaccacctgataaagcagtaatctttttatctaaaaaatcagcagagagatcaacttgattaagtaaatcagctatttgcttgtcatttacatctacttttctaatttcatacgggaaaatcaaattatctcttactgtttgcccaaataaagacggctgctgaaaacaatatgaaacttctctacgatattgaactggatttaaggagctaatgtttttttcttgatatagaatatcgcctgaattagcactaattaaatttgcaatcaatcgtaaaatcgtactttttcctgcacctgatgggccaattaaggttagaaaatcgcctttattaaccttaaatgatacatcttgcaatatttgttttttatctgcactatattggatatgttttaattctaatattttcattcttttgcctaactaaataactcatttttctaattatacaactaaaaaaataaaggaaatccaatattttcattgaatttcctttatttaaattaatatcgataatgattacttagtcaacttttgtttactttcaagtaattcagcacgttgagctaagttcatgtataacttgttgttgtaggttgcgataccttcaatttcacgaccagtgtggtattggtaagtatccttaacttcaccatcagttgcaatcttagcaattacgtcattgaatgcaaggtagaagttattgttcttggcatcataagtaaacccttgagtgtatgtgtttgctacaatgccacccttagttgcacctaccatagttggataccagttatcgcctttgcggttgaattcccagtattcagtttggtctttttctttattataaagagttgtgtaaagcttgtgatcatttacaacaacaccattattgaagtaacgaccgtctgaatcactaccgttccagcatttaatagtccaaatcttgttaatgcacatatcgctcttccgaatttggattaactcttcagacatattgctcttgtatgaaaccttattattgttatttagaacgtaaatgtatttatcagttgagcccattgcttgaccgtgaccaattggaatatatggactaactttaatgttcttaacgtaagaattgaacttcttttggctcatatcaagtaagtattgtccgttaaatgcattggttaaatggttaagattatatcctacaatatgaccattgctaatcagagtactacttaataaactagtgtacaaccagccatttgacatggtaattccttcaggaatatgacctacacggttaatatagtcatcatttttaatgtcacggtaaacacttaataaaactggttggaagaagcgagtagtgaaatctaattttccgctttcactatcataagcatgcttattcttatcaggagtaaaatcagtcttagttacatagttagcagaacttccatagtaagtcttccaggatttcaaatcgccgttaaatggcttagcttggacgctatcagcatcagcaattccttccttagtactctttctgacagttaccttaacagttgcctttgctttaccatagctatatttaacattataggtacctggaattgagcaatcgattgcatcttctgaaatcttaatatctgctgtatcaattacagtacccatataattggttacataacttaccgcatctgttggatcaaaatcgtaatgactattttgtactaaactgatagtctttggtacagcgatagtgtttctagtaaagtagttttggttaacataaccaactttacgaccatttacataaatacgccaataagttgcatcctttgtcttaattctctggtcagattgaatatgagcatattgataatcgctagcatcagcaatcttaccactaggtttaccattactaatctttttataaacaggataattcttattgctacctactttaaccattaagtcataagaagtacttgtttgagctggtcccttcttcgcactggaatcagtcttagcagtatctgtattactatcagtagttttagaattatctgcaaatactgcatttgtagaaccaattaacaaaccaacacccagtgctacagctgaagtagcagttaaaattttatttgaatacttcaaacctatcctccgtatcttatattttgcattttacttttatattataatatataaacactgttagctaaaatacatttttattaccattgttaccattgagcttctttatttgacactttcattacgaagtgatttaattagcactgtacttgaaagagtgctaattaatacgaaatcaattaggaggcaaatttatgctagtacctacagttattgaacaaactgctcgtggtgaacgtgcttatgacatttactcacgcttattaaaagacagaattatcatgcttagcggtgaaattaatgaccaaatggctaactcaatcatcgctcaattactcttccttgatgctcaagacaataccaaggatatttcactttatatcaactcaccaggtggtgtaatcacctccggcttagctatcatggataccatgaactttattaagtcagacgtatcaactattgcaattggtatggcagcttcaatggcttctatccttttgactagtggtaccaagggtaagcgtttcgcacttcctaactcaactgttttaattcaccaaccattaggtggtgctcaaggtcaacaaactgatatccaaattgcagctaacgaaattttgaagagccgtaagaagatcaacgaaattttgcacgaaactaccggtcaacctttggaaaagatccaaaaggatactgaacgtgacaactacttaactgctgaagaagccaaggaatatggtttgattgacgaaatcatggttaataagaagaagtaattaattattaaaaattattcacactctaaaaggagcttgcactcattgtgcaggctcctttttcttattctcttaaactctcagctaactcatgtagtttcttaaatcggtgattaactcctgacttcgaaatcggaccatccggaatttgattagctacttcctttaaagttaattctggatgcgccaatctaaaacgcgctaaaacttgcaatttctctggtagatcatctaagccgttttcttgttcaatcagctggatgtcttctacctgcttagctgaagctgaggctgtttttttcatattcgcggtatcacaattaaccaagcgattaaccgaatttcgcatatctcgcataatacgcaaatcttcaaagttaagcattgcattaagtgcacccactatatgcaaaaagtcgccaatttttgcggcttcttttaaataaacaatatagcctcttctacgtttagttgctttagcatttaaataaaaataattattcatcaacttacataaatcctcattatggtcctcataagttgaataaatctccaagtgataacgactcgtttctggattattgacactacctccggctagaaatgcaccgcgtaaataggacattgctccttcacgtgaagtcataattctctgcggaattcgcgttaccaaacctttttcaggatcccagatttgtaagttttctaggatttcttgtaccttctgattcaatcgtaccaaatattgattattttttttcaatttcatcttgcgcgagacaatcagcaatggctcaataccataagcaatcttaatcagcttaaaaattcgtcgagcaatcgcaggattttctgtagtgatatccaggctaaattgatgatcgtgcaagtttaatacaccattcattcgcaaaaaagcagctaactctgctttggcatgctctggatgcacctcaagcgaagttagctcctttttgacttcactagcataactagccatcattttccttcattcttttacgtgacattgattcaaatgccagattaataatttcttttcctaccttttcaccatcatgaaataccaatccatgacgttgatcgataaagtcatcagtaatgacacggcagttttgctttcttaagccttcaaagtcattcttaacaggctcaagataagcatcataatcttctgggtgaaatttgctcatatcaattttggcaccattaaccagagcggtattgatataatttccacctaagtgatcgttaattacctgtacgtgttccacatcactaaagtgatctgtctcaccacgctgagtcatgatattgcaaatataaataacctcggcgtcagtctcacgcactgcttcacctaaattagagatcattaagttaggtaaaattgaagtaaataaactacctggcccaagtacgactgcatcagcttgcataatcgaagccagtactggtaaaacagctctaggctcttcatccgaatcagtatcggtcacccagacacgcttaatccgcttatctttagatgtgatttcagtttcacccgattccgtagttccatccacgaattctgcgtttaaagtcaatggttcattggaagctggaaaaacatgaccatcaattttcatcatttttgacaaagattgaactgcatcaaagatattgccatgcatttcattcaatgccgcaataattaaattaccgattgcatgtcctgaaaaaaaggaatcggatgaatcaaatcgatactgaaaaatattcttttcttcctgaggtaagtcactaagtgataccaaaacattacggatatcaccaggtggaactacgttaataaagttacggattgaaccagatgaaccgccgtcatctgaaaccgttacaattgcagtaatttccgcgttttgatcttttaaggcattcaaaataactggtaaacccgtaccgccaccaattacgactacacggggacgtctgcctttaatcacgcgaacaatccttgtttctccatatggcacaggtgcgcacctactttctaatataacgactcacttcacggtgagtaatatcgacttgatattttttagctaaatctcgtgccaactgttgggcaattgaaacactccggtgttgacccccagtacaaccaattgcaatggtcaacttttccttcccctctttgatatatccagggatagctgtttcaagcaaatcaagcaattttttataaaagacctgtgtttcttctttgttcatcacatagtcaaatacacgcttgtccagtcccgtaaatggtcttaattctgaaatataaaatgggttaggcaaaaaacgcacatccattacaatatctgcatcaattggcatcccatacttaaagccaaatgacatcacttcaattgaaaatggctgccgcttgcgatcactaaatgtattgattaatttttgctttaattccttagtcgacaagtttgacgtatcgataatataatttgatctatttttaattggcattaaaatacgacgttcttcttgaatgccatcaagcaagcgacctttgccattattggctaaaggcggaagacgccttgtttctttataacgagcaaccaagacatcatcggaagcatccaaaaataggatagtagcttgcacattgccattatcttcaagtgaattaacttcatccaataaatcgcgataaaatgtcttaactcgtaaatcaattactacggctaccttatgaaagtcattggaattattaattaaatcccaaaaactacctaataaagttggaggaagattatcgactacaaagtagcccatatcttctaagtcatgagcgaccacagttttacctgctccgctcatgcctgtgactattaataattgttttttctcatcagccatgctaaaatcctcctctttacaaattatatcataccgggtgtgtcataattgtgcaaaaaaaagaagcctttcggcttaaatttttatcaaatattaacggtgcataaatgcaaccacaatttcattaatgccaaagactaataaccagaatgcaactaaccatactaagcttaaggctgcgattactggattaataattaagaagaaggcaataatcaaacttaaaatattcaaaatcaagttaaatacaaagtatccggttgaaaatgcacgtaagtgccatgaccaagcaatacctacaactgaatcaacaaagaaccagattgcaaataagtaagcgatagtcaaaccaccaatatcatatgagcaaatgaacaagataccgataatgatatctaatatacctgacacaattgctacccaactacgtgagaaaaattcacgaaagcgtgagtaagcagccaaccatacaataccttgaacgattgatacaatagcaaaaatcaagacaaatgcatgcaaccctttagctgggtgacgtaataacacgaacgcaactacgaccattaagataccggcaataaatgcgccccagtcaaagccgtgattatctctagaactagaaaaaatatccatttttattcctccttgcagactattttacacttattcaaggttaataaaaactattggctattgtcttctagcctatttttttgcttcttttgttagtttagtatcacgttctaagactggtttcaaatactgaccagtatagctttctttaactttcgctacttcttctggcgtaccggtagccacaatttgaccgccacgttcccctccttcaggacctaagtcgatcagccaatctgcatttttaattacatcaagattatgctcaataattaaaaccgtattgccttcatctaccaaccgctgcaaaacttctaataaacgcttgatatcatcggtatgcaaaccggtagttggttcatcaagaatatagaaatttttaccagtagaaagcttttgcaattcagcagctaatttcattctttgagcttcaccaccagataaagttgtagcggattgacctaatttcacatagcccaaacctacatcaacgatagtctggagtttacgctgaatcttaggaatattttcgaaaaacttagttgcttcattaatcgtcatatcaagcacttgagcaatattctttccccgataagttacttccaatgtttcagaattataacgagtgccgtgacaaacctcacatggtacatatacatcaggcaaaaagttcatttcaatcttgataattccatcaccatgacaggcttcacaacgtccacctttgacgttgaacgaaaatcttgctttagtataaccacgcaattttgcttcattagtttgagcaaataaggttctgatatcatcaaaaacactagtataagttgcaggattactacgtggtgttctaccaatagggctttgatcgatatcgatgattttttcaatattcttgtaacccttgattgacttatacttacctggcttagttgaattattgtttaatttttgggctaaagcgcgtttcaagatcatattaaccaaagtagatttaccagaacctgagacaccactgaccacaataaatttgcccaacggaaaatcaacattaatattctttaaattattttcttgagctccagtaattgtaatctttttaccattgcctttacgacgcttcaatggaaccggcacaaattttttaccagacaaatattgccccgttaaagaatcaggattctgctctacttctttaggagttccttgtgccataactttaccaccgtaaacaccggcaccaggtcccatatcaaccaaatagtcagcttgccgcattgtttcgtcatcgtgctctaccacaattaaagaattgcctaaatcacgcattctctttaaagaagcaatcagccgatcattatcacgttgatgcaaaccgatagatggttcatccaaaacatacataactcccgataagtttgagccaatttgagttgccaaccgaatacgctgagcttcaccaccagacaaggtattagctgatcgagaaagagttaaataatctaatcctacactatccaagaatgaaagacgatcgcgtacttcctttaaaatcggcttagcaatcatagtctcttgctcgcttaatttgacgtccttaaagaaatcaagtgctttatcaatagaaagctccgaagcttccgcgatatccttgcccatgactttcactgctaatgctttttcattcaaacgcttgccgtgacaagttgaacaagtaagttcagtcatatatttgcccatcacatcacgcataaacttggacattggtcgtttataacgccgctcaacattggccattactccttcaaatggttgaacggtatcattaacgccaaagtcaccagttacatggaatttcaccggcttagttgagccatgcagaataatgtcgcgttgacgtttagttagtttattaaaaggcttatccatcggaatttttaatgccgtgcaagcttgttccaacatttcagtatagtaattggaagtcttccatggagccagtgcaccttcagctaaagattttgttttgtccggaacaaccaaatcttcgtctactgctaacttcatccctaacccatcacaatcaaggcaggcaccaaatggtgcattaaaggagaacagtcttggttccatttcacccacagtaaagccacactttggacaagcataatactcagaaaagttaagcatttcaccaccaattacatcaacattcatgtagccatctgacaaacgaagtgcagcttcaatagaatcaaataagcgagacttaatgctatccttaacaatcaaacggtcaacgacaatatcgattgagtgacgcttgttcttagctaattcaaaatcctcaccaatttcgtgcatctcaccatcaacaattacacgaacatatcctgcacgttgcactcgcttaaatacttccttgtgttctccacgcttagcacgaataactggcgctaaaatttgaattttcgttctttctggtaaagccatcactcggtcaaccatctgatcaactgattgtcgttgaatcagcgtcccatcattaggacaaattggatggcctactctggcccaaagcaaacgtaaataatcattaatctcagtgacggtcccaactgttgaccgtggattatgtgacgttgttttttgatcaattgaaattgctggatttaaaccatcaattgaatccacatctggtttatccatttgccccaaaaactgtctagcataactagaaagtgattgcacataacgtctacgcccttctgcataaagcgtatcaaaggctaaagaacttttacctgaaccagataagccagtaataactactaacttatccttaggaatagttaaattaatgtcttttaaattatgttcacgtgctccgcgaataacgatcttatcatttgccattaaaattctttccttttcttgatgatttttgcaattccataattgcatcccgcaagttagcagcttcttcaaagtcaagcttcttagctgcttcttgcatttgctcttgcaagttgctaatcattgtcttcttttgcttagccgtcaattcatcaaaattaagatctgcaaaactatcagatttttcttctttttcactcgacggtttagtaatcgaaattacgtcttgaatcggcttaatgattgtcttaggcgttatgccatgctctttgttaaattccatctgaattttacgccgacgcttggtagctttaatcgctgctctcatggaatcagtaatcgtatcagcatacatgattacttcaccattggcattacgggcggtccgtcccatagtctgaaccagcggccgatatgctctcaagaagccttccttatctgcatccagaattgctaccagtgaaacttccggtacatcgattccttcccgcaacaggttaattccaattaagacatcgaacttacctaaccgtaagtcacgcaaaatttgcattctttccagcgtcttaatatcagagtgcaaataacgtactttaattcctaagtccttcaaataatcggttaagtcttccgccatttttttggtcaaagtagtaacaaagactcgttcatgacggtcaatccgtttattaatttcgccaactaaatcatcaatttgaccctcaattggccttacttcaatcttgggatcaagcaatccggttggtcgaataatttgttcaaccttatgatctgttcgttcaagttcataatcacctggggtagctgagacatacaaaatttgattaacatgcttttcaaattcggatagctttaatggacggttatcaagtgcagatggcaaacggaaaccatagtcaatcaaggtttgcttacgattacggtcaccattgtacattgctctaatttcaggcatagtagcatgtgattcgtcaattaaaattaagaaatcatctgggaagaagtccaacaaagtatacggtggctctcctgcttttcgtccttccatatgccttgaatagttttcgattccgttggtatagccaacttcacccatcatttccatatcataggtagtacgttgcttgattctttcagcttcaagcaatttgccttcgccttcgaactttttaacctgcaatttcatctctttagaaattgctcccaaagctcgccgcaattgctcgtcattggtcataaagtgcgtagctgggaaaagcgaaatactctcacgctcaccgatcacctcaccggttaacgaatcaacttcaacaatgcgatcaatttcatcaccaaagaattcaattcgataagcatgattagaattgccggctggaaagacctcaactacatccccgcggacccgaaaacgaccgcgttgaaagtcaatatcattacgatcatattgaatatttaccaaatcacgcaacaaggtattacggtcatattcttcgccttcatggatcatcaagacactgcgcgcatactctttaggatcacccaaaccatagatacaagaaaccgaagcaacaactactacgtcattacgctccattaaagctgaggtagtagcatgccgcaactgatcaatttcatcattgattgccgaatccttttcaatataagtgtctgattgtggaacgtaagcttctggctgataataatcatagtatgaaacaaaatattcaactgcattattaggaaagaaacttttaaactcaccatatagctgccctaccaaggtcttattatgcgtaataactaatgtaggcttattcagcttagcaataatattggccatggtgaaagttttcccagtaccagttgcaccttccagaatctgttctttatatccttttttaaatccagcagtcagtttatcaatagcttgctcttgatcaccggctggtttaaactttgatactaattcaaatttgcgatttttttgtcgtttaatcataaaaaactcctcaagaaaaaagttggacaagcatagtccaactttttaattagtatctatattttactaccgcgaacgtgctttcgcacgaaaaatgcttaattatttaagtaaatctgctaaagccttttgataatcttcagctgccttttctgcagtggcaatgtcttttttgtttacaccaacataggccttaattactggttcagtacctgatgggcgaagtgctacccaggtttcatcatctaagaagtacttcaacacattagattctgggaacccttctaatggtgtctttttgccattttcaatagtttctttttgcaagaaatcttgaatcttaagcactttactaccgccgatttcagttaagtgctcattacgcaacttgctcattaattcggccatcttcttttgaccaccaatacctggcatttcaattgcacgggtaatttcataagcaacgccatacttttgccaaatttcttgcaaaccatcaaagacagtcatcccacgtgaagcatagtatgaagcaacttcggcaaacatcaatgcaccctgcatggcatccttatcacgagcaaatggtttaaacaaatagccatagctttcttcaaagcccatcaagaacttagcatcaccagctttattcatccggtcaacttcttcaccaatgtacttaaagcccgtcaaaacatgcttagtcttaataccaaagtcctctgcaatcttaaatggcaaagcactagaaacaactgaagtaacgatctcataatcaggggttaattgaccattttccttcatatgagccaataggtagtaagccatcaaagtagcaatttggttaccagtcaaaacttggaaatcaccatcagtttttctaactgctgcacccattctatcagcatccgggtcagtagcaataatgacattagcatttacctcatttgccaacttaaaaccaggttcaaaaacatcacggtattctggattaggcttaattgtggttggaaattctggatcaatgattgattgacttggcacaggaatcacattatcaaagccgccttgtctgaaagcacgatcataaagcatcttgcctgtaccatgaagtggagtataaatgatctttaacttgtcagcgttggccttaaccatctctggatcaacagttacttgcttcaattcattcaagtaatcttcatcaacatcttcacctattaactgcaaggtgccattagcacgcaattcttttactggtgcagccttgacagcaaaaatatcagttactttttgagcataagcaaaaagtcgatctgcattatctggtgccatttgtgcaccatcttcaccgtaaactttatagccattgtattgcttagcattgtgtgaagcagtgatattaattccagcgaaagtatgcaaatgacgtactgcatatgaaagttctggtgtcggtcttaaatcatcaaataagtaaacatgaattccgtgtgcacctaaaactctggcagcatgttctgcaaactctcttgagtgatatcttgaatcaaaggaaatagctaccccacgctttttagcatcagcaccattttcttcaattaaacgagctaagccttcagttactcgacctacagtaaacaagttaatccggttggtaccgggttcaagacgaccacgcatccccgcagtaccaaaattaatatcctgtccaaaggcatcttcgatccatttttcatccttgcccaaagtatttaattgatcttttaaataatctggtaaattagtagctttttgccattctgtataaatttctttagcgtccatcaatgtcctctattcattaaaagttggatttctaaagcgctttcaaactgttaacaattttctattatctgctattaattataaaacttattagtcattaatttaagctttagacaaaaaaagacatgtccaatacgaacatgtcttaatgaaaaaacgaataaatttaatttttcttgtcttgtaagtcttggtagtaattatatgcagcttgaccagctacactaccttcaccaactgcattagcaatttggcgtaaatctttttgacgaacatcacctaaagcaaagataccaggcaccttagtttccatatgatcatcagttacaatccaaccatggtcatccaagataccaagatccttaaaaggttcagtttgtggtaaaacacccacgtaaataaagacaccagcaactggaatttctttttcggcaccagtttccttatcgcggtacttaacccctgtgactttcatgtcatcgcctaagatttcttcagtttgtgcattccaaatgaaatgcatcttcttgtttgcaaatgcacgcttttgcaaagttggttgtgctcgcaattgatcacggcggtgaataactgtaacgctcttagctaattgtgaaagataaattccttcttcaattgctgaatcaccaccaccgatgacagctacatcttcatctttaaagaaagcggcatcgcagacggcacaatatgaaacacctttgcctgaatattcttcttctccaggcacattcaaatgcttatgatctgaacctgtagcaataattacgatcggtgcacgatactcattgccatcatcagttttaactaacttatcctcgccatcgagttcaacactttgtacgttgccatacttataatctggttcaaacttcatcattgtgtcgtacatcttttgactaagttctggacctttgatttcagaaaaaccaggataattgtcgatagcatcagtattgttcatttgaccgccatagggaccgcgatcaagaacaagaatctttaagttagcacgcgcagcatataagccagcagtcatcccaccaggacctgcaccaataataattacgtcgtatttatcagccataatctatccttctttctacttacttttgataagcaaataatacaatagatttaacttcttgccaactattttgcttatcttttataaacgaatttcaggctttggttctctacccatcattttcttaatttctgtatcaacatcagcatcttcataaagaacacggtagattgcctctgaaattggcatatcaatgcccttttcttcacataattcgtgaacagctttaacagtagtagcgccttcgacaacttgtcccatatttttcaaaacgtaatctaaagtcttgccttcgccgatttgtttaccagcacgccaattacgtgagtttactgaagtacaagttacaattaagtcaccaatacctgacaagcctgagaaggtcattggcttagcaccaaagtattgcacacccaaacgagtgatttctgctaaacctctagtcatcaaggcagctttggcgtcatcaccatatccttggcctactaaaatacctgcagcaatcgcaattacgttcttaacggcaccaccaacttctacacctactaaatcatcgttagtgtagaaacgaacgtagtcattggagaacaattcttgtacccgcttagcattttcttcattagttgatgcacatgcaatcgcggttaaatctttttgagcaacattttctgcgtgactaggacctgaaattgcaacaatcttatcttcatcatctggataaatttcttcagttaaaatttcagaaataagcttcttactgcctggttcaatccctttagttgcagtaactaacagtggcttagcacccgtcttatctaaaaccttgcgtacgtttttagcaacgattctaactgccttagttggcaaaacaaataaaacaagttctgccccatcaagagctgcttccaaatcaccagtagccttggtattctcatttaatttccaatccttcatatagtggctattggtgtggtgagcgttaatttcttcattaacactatcaatgttaccgtaaagagttacatcgttaccattatcggctaacattgaacccaatactgaaccccatgaaccattacctaaaactgcaatctttgtcattttttctctcaaactttctaattaaaatcttttattaattctaatctcttgaatacgggtattttaatccactaccatccaaataccattttggattaacgactttccgccgataaatccataaaataattgtagcaataaagaggattaaacttaatgcctgtgatactcgtattataccaaaaatatacagactatctgtcctcattccttcaacgaagaaccttactacactataccaaagaagataggtcatgaaaacttctccctgcttgaagagatgttttttatgacgcaaggatagaattaagattaagccaatcaaattaaaaaatgattcgtacaaaaaagttggttgataatacgtcccgcctattttcatttgctcaataataaattgtggtaagtgtaagctttgtaaaaaatgaagagtagttggtgcgccgtgcgcctcttgattaacaaaattaccccagcgtccccaaatctgagctgccatgactccaggagcaatgatatccagcattaaaaatggaggtagcattcgtttataacagaaaatcaacagcacaattaagccggcaattaaaccaccataaatcgcaatcccaccattccaaatcgcaataatttgctcgggatgctgtgaataataaccccattcaaaaatcacataataaatacgtgcgccaacataccctaacggtactgcccacaatagcaaatcgacaaaatcatctggaataatttgacgtttttttccttcgttaatcgccatccagcaagctaacataatggctactgccataatgatgccataccatttgacacttaaattccctaaatgaaaggccaccggattaattactaaattagtcattatgcggcaccttattcgtatcttcttttgagtgctctgaaatcagactagtcaaattattatcaaaagtttgagttgcatcatagcccatcttcttagctctgaagttcatcgctgcaacttcaataataatttcaatattgcgtccaaccttaactggaatattaacctgtggaattggtacattgcagatttcacgcgtattttcttgaaaacctaggcgatcataattagcttttggatcccaattaaccaaattaattaccagttggatttctgttctattttttacggcaccggcaccaaataaattcatcacatcaataatgccaattcctctgatctccattaagtgctttaagatctttggtgcttcacccacaacggtattatggtctttttgaaaagcatctactcgatcatccgcaattaatctgtgtcctctttgaactaatcccaaagcagtttcagacttaccaacaccagatgcaccagttaacagcacacccatccctttgatttcaaccaaaacaccatgaatgctggttcttttggctaaacgagcacgcaagtattcagttaaaatactggatatgtaggtagttgactctcttgtacgcaaaattgggattttgtgttcctctgctgccgtagttaattcttccggtacaggcaaagagcgagaaatcaaaaaacacggtgtagccttagtacacattttgttaaagacatgcattctaatatcatggtccaagcgtgccgcatatgaaatttctgtccgacccaataattgaattcgttgcgcaggataaaaatcaaaataaccagttaattctaatccagggcgataaatatcagaaacataaatttcttcatctttgatatattcctgtccttggtaaacttcaaggatactctgattgtcctggatcaatttgcttaatctaacttcatcagccatattaggcctcctaactatttatcaatatctttagtggtgacatttctagctttttttcttggtctaggaccagaagtactagtagccttaaaccactcacgataacttccactacttggcatattatcttgatttttccttccagtaaaccgataaataagccaaatgattaaaatcgcaattacagctactggtaaaagtaaaataaatgccttaaatagaacaaacaataaacttaaaataattagcgctactaaaacaagcgttacaatttccattaaactcattttttaacctaatctggattctcttgactaagcaaccactgtaaataggaataaataaacggttgcaattttccgtccattactccttgagcgtcagctgtttcatgacctgtccgcaaatctttcactaggttgtaaggatggaaaacatatgacctaatttgtgatccccagccaatctccttttgatcgcctttcagagcctgcttttgcttacgctttttttcttcttctaagtgaaaaagctttgctcttaattcattcatcgcagtttcacggttttgcaattgtgaacgctgtgcctgagacgtagtcacaattcctgttggtaagtgcgtaattctaacggcactagaagttttattaatatgctgcccaccagcaccactagagcggtaaacatcaacccgtaaatccttaggatcaatatcaatttgaatactgtcatcaacttctggaatcacttctacagaagcaaatgatgtatgccgtcttttagccgcatcaaatggcgaaattctaaccaaacgatggacaccattttctgatttaagcattccgtaagcatttttacctacaattcgcgcactaacgctcttcaacccagcttcttcaccaggctcataatcgttgatttcaaatttaaaaccagctgtatcacaataacgttgatacattcttagaagcatctgtccccagtccatcgcttctgtaccgccagcaccagggtgaatttccatcaaagcattatggctatcatacttacccgacaagagcaggtctaactcataattatgaaaatcttcttgcagcgtagctagatccgcttcaacttctttttgcaagtcaggatctggttcttcacgcaaaagttcaaccgcagtagtttcgtcttcgtagctagtttgcaattttaaaaatgaatcacgtttttcctttaatcggttggtttcactaattaatttttgcgctttttcctggttattccaaaaatcaggctgcgccatcttgttttcattaatttcgatgctttcatcaatcgcatctaagtcaaagagaccccctaaagtgatttagacgtttttttagttcatctaacacactttgaatttcactaatttccatttttacctaccatcttttattttattgcaaaaaaagggaagctcttaactcccctttttctttattaacgactaagattttgtctaatttcagccttcatgaacaaacgagttacatcaaattcaatatttgaaatcatttcttcaaacattctgtaaccagaatcttgatattcaactaatgggttcaattgaccgtatccacgaagaccaattgattgacgcaactgatccattgcatcaatatgatcagtccaacgatcatcaaccacacgcaagataactaccttttcaaattcaagcatttggctaggatcgcctaaggccttttccttatcttcgaagttttgctcaacaatgtcataaagcttcttcttcaaatcttcaacactaatagtcttgaagtcaattgagtcagttaccttgtctgaagtcaaacttgaggaaatgaaatcgcgtaatgagtcaagacgccattccttgcgttcaccttgagtaaacattgctacttggtgatcaattgttctgtgaatcattggaattaaaacattcttcaatgacttatcagcttcaatgacctgcattctttcgccgtagataatttcacgttgaatacgcataacatcatcgtattgcaaagtttgcttacgagtatcatagttattaccttcaacacgtttttgagcagattcaacttggcgagtaatcaagcgactttcgataaccttatcatcatcattatctgataaacgatccaagaagtccttaactcgatcaccaccaaaacgcttcatcaaatcatcttcaagcgacaagtagaatctggtgtaacctgggtcaccctgacgaccagaacgaccacgaagctggttatcaatacgacgtgattcgtgacgttcagtaccaataactgccagtccaccaagttctttaacaccaggcccaagcttaatatcagtaccacgaccggccatgttagtagcgatagttacggcaccacgttgaccagcgttcatgatgatttgagcttccttagcgtggttcttagcgttcaaaactgcgtgaggaatacctgctttatcaagcatcttactcaaacgttctgaactttcaatggcaacagtaccaaccaaaacaggttgaccattagcgtgacgcttcttaatttcttcaactacagcgtggaacttagagtccaaagttggatacaaaatgtctggcatgtcttttctggcaattggacggttagtaggaatcgtgattacctgcatgttgtaaatttcacggaattcttcctcttcagtcttagcagtaccagtcatacctgacaacttcttgtacattctgaagaagttctggtaggtaatagtagcttgcgttcttgattcttcttgaatcttaacgccttccttagcttcaatagcttggtgcaagccatctgagtaacgacggccttccattacacgaccagtgaatgagtcaacgatcaaaacttcgccatcttgaacaacgtagtcgatatccttaagcatgatgtagttggcacgaagagcttggtcaatgtggtgaaccaacttttggttttcaacatcgtacaagttctttaggccaaagtgttgacaagccttttcaataccagttctggtaagtgaaatagtcttagttggccagtcaatcttgtaatcgccgtgatcttcatcatcgtcggcatcatcatcgctcttgtcttcagtcaaagtcttaacaaagcggtcagcacggatgtaatcactgtttgcttgttcagcttcaccagaaataatcaaaggagttctagcttcatcgattaagatagagtcaacttcgtcgatgatagcgtagttcaatggacgttgtaccatttgttccttgtaaacaaccatgttgtcacgcaaatagtcaaagccaagttctgagttagttgagtaagtaacatcacagttgtaagctgcacgcttttcgtctggtgacattgagttcaagttcaaaccaacagttaagccaagccacttgtaaagttgacccatttcttcttcgtcacgacttgaaaggtattcgttaacagtaacaacgtgtacacccttgccttcaagtgcgttcaagtatactggcatggttgctgtcaaagtcttaccttcaccagtcatcatttcggcgatgttaccgtagtgaagtgcaataccacccaaaatttgtacgtggaatgggtaaagtcctaatacacgcttagcaccttcacgagcaactgcgaatgcttctggtaaaagatcatccaaactttcgcccttctttaaacggtcacgaaattctggtgtctttgcttgcaattgttcatcagatagcttgctcatttcatctgcatgagcttctaccttagctgcgattttttcaaatttcttaagttctcttttatcgtcgttatatagtttctttaaaatatttaccattaaatcggtccttatatgtcgtaaagtctaaaaatacagaataattttaacatgtttatcagcaaaataaaaatattctaaacaaaaaaccccacgctcaaacaaacgcgaggttttgaattaacgagtattttaactcaattattcgttagtttcaattaagccgtaacgaccatcgtttctacggtaaacaacgctagtgccgttagtttctgcatcttcaaaaacgaagaagtcatgttccaacatgtccatttgtaaaatagcttcttctggatccattggctttaagcttacacgcttgttacgaacaatatcaaattcgctaggcttcttttcttcttcttcaggttgttctacaaagaaatcttgtaatcccttttcacgactctttctatttacacgagtcttgtactttctaatttgacgttcgagtttttcagaaacgaagtcaatgctacgatacatatcatccgtggtttcttcggctctcaaaactaagtatggtaaaggaatagtaacttcaactttagctgagtgatcacggtatactctcaagtttacgtgtgcaatcacatcttgattcaattcgaagtacttctctaacttgtttaaccgcttttctacataacttctcaaagcatcagttacttcaatattttctccacgaacattgtactttaacatataagattctcctttcaccgctatgcggtttttctttacaaatttattataccaaaaaatgtaagcgtttcataacaaatctaatgacaaattgaaaagctttcaattttcatttcgggaaaaccctgctgtaaacggtcccgcgcgtgatatagcgtgcgcccggtcgtgtaaatatcatccaaaattaatacttttcctgaaactatattttccttgattttaatatttttatcaatcaaaaagctttgaggcgttttaagccgctcctctttgtttttctcaccttgggcatgactacccgattgtttaatcagaagcggtgtcagcggcaaaatatcagcataaatagcaaaaattgtatcaaactgtcgtcttgattgatgttcaggtgaagtgggcacgggcacataaaagtcatagttagttttacacaaatagtcataacacaaatcttgcaatacttcccgcaaaacataatctccacgccgcttatacgcaaccatcaagtcatgaaaagcagaattataacgatataaagcatgattatgcagaatattttcgccataaatggcttgccaatttcgacaatcgctacacataaagccttgacctagttccttatcacagccagagcagcgattgtctgctaacttttcaaattgttttaaacattgcaagcaaattttactttttcgcgctgttttaaaagaaaaaagttgtgcaaattgtaccggtggagtaaactcctgctcacataataaacaagttctcatctattcatccccttgatctgcttaatactctgtcgaatattcttggtataacgatgataacaatacaaaactaagcccgtttggtcatcgtgagcccgaccaactcgacctgcaatttgcaccaaactagcagcggtataaattgcatcatctgctgcaataataattacccaaacatttttaaaagttacaccacgctctaaaattgtggttgtcaacaataagtcatatttacgatcacgaaaagcctgtactttttctaatcgttgcggatcttgtgcatgaacaccggccaatttaattttattttgcaactttttccgcaaagcttcttgataaagcggaatttcttcaatccgtggtacaaacaaaagcaaaggatgaccactttgaatgacttttttaatctcctgcattaatttaggatgaatttgtcccttccgcaaaaacggcctgataaaaagcctttctcttggtacaggcaataatccaccatgaaaacgccgatttaagcgcaaaatttctaacttccctgttttagcttccaaaagcaaatcgttcgttggcgttgcggttaaatacattcgagtcccagttgttttaaccgcatttttggccgcaaaatgtagttgcggattacctacataaggaaaagagtctacctcatcaattaccaataaatcaaaggcacgataaaacttcattaattggtgtgtagtacaaattgtcaactgctctagccctatttccttaaattcacggccatgatacttaccgatctcaacttgggcaaacgctgccgaaaatcttggaaacagctcatttaccacatcaattcttggtgtagcaatacaagcgcgctgtccttttttcatacatcgagcaatcaactgaaacaacatctcagttttacccgccccagttacagcatgaaccaatgtattttttctttgttcaaaattttgtactaatttatccgaaatattctgctgcaatggggttagtttaccttgccagcttaatcccccgtttttaacatgagaaaaagtattattactgtcttttctaataagccaatcgccctcatttgcacgtcccaagccaatacaaccacgacaataatatttaccattaggcagtcgactattaacttggctgccacagcgattgcatttacctttttcaattactggaattttgcggcatccctcaaatgtgctagaatcctcttgactaacaatccattgacgacctgataatagagtcaaatcttccatatttttacctccctattatctattacgcaaaaagaggcgattattttgtcagaaaaggaaaattttttaactattaaagaaaacggcaccggtgaattaattatcaaaaagagcagattcattgccaatattgcccgcaccactactactgatgcggcaaatgattttattcaaaaaatctctaaaaaatatcgcgatgcttcgcacaatacctttgcctacacgatcggcttaaatgacgaccaggtcaaagaaagcgataatggtgagccatcaggtacggctggtgttcctgaattaaaagcattgcaattaatgaatttaaaaaacgttacagtcgtagtaacccgttattttggtggaatcaaattaggagcaggcggtttaattcgtgcctattccaatagtgtcaccaatgttgttgaaaaagtcggcgtcattaaacgcgttttacaacaagaattaatttttagcgtaccctataaccgcttcgatgaagttgatcattacctaaaacagcaaaaaatttttattgccaataccgaatacggtgtggatgttaaaattcatatttttgttaacgatgaccaacaagctaaacctaaggaagacctaactaatttattggccggacaggttacctttactaatggtgaaaaacgctataatgaaattcctgttgaagctaataattatcatgaacaataaaaagagcatttggatatttccaaatgcttttttgctacttattattttttttactcttcaattgatctggtttttcgtctcctaagtgccaaacttcaattgttggatcagttttactcttttgattaataattttctgaattacatgcatcaaaggatggtatttttcacccaataaaccaattgattccacaaaatactctaaggcaatcagcaagcctaagatcagaagccaagtgccccaagttggcgaaagcaggaataataaagaaataaatgagaaaaccaatgataatgcgtaaatagtcaataccgtctgtcggtgcgttaaccccattcgcatcagctggtgatgtaaatgatgcttgtctgcttctgaaattggctttttgtttagctttctccgaatcattgcataaacggtgtcagtaataggcactcccaaaatgataattgggaccaacaatgaaataaaagttacattctttaaccccttcagagataaaacggcgatcataaaaccaatataaagtgcacccgtatcacccaagaaaatttttgctggatggaaattatatggtaaaaagcccaataaacaggcagctaacataaaacaagcaattgggacatatagctgatgagtgtgcaagaagaaataacctacgatccccatggtagtcagagagatcattgaaaccccatcagctagcccatcaagtccatcaatcaagttaactgcattagttaaagctaagatccaaaaaatagtaattgggaaactccaccaacctagatttacttcatgtgcgatgaatggcacctttaacacattcattctgattccagctaaaaagtagataatcaatgaagcgataaaaatcccaaacattttttgtctaggttttaactccaaaatatcgtcgatcaatcccgtcaaaacaattacgcttgaagcgagtaaaatcgaaaaaatttcatgagtcggaaattgctcacgcaacagaacaaaagtaccgatattaaaagtaacaaaaatccccagtccaccaatcgttggcattggtttcttattaactcgccgggcattaggattatcaacagctcctaagacaaaggcaagccgtcgaataaacggtgtaattgccgctgaaataattactaataagaataattcaacaataattttaaacatatttggctactttccttatttacttgttctaattatacaagtagtcagtattttgcacaaatagcaaaaaagtttggaaaaattatcttccaaactttttaatttatttagcgatcgccacaactcttttttcacggataacggtaatcttaatattacctggataatcaagttctttttcaacctgattacgaatatcacgtgccaaaataactgtccgatcatctgaaatttcgtcaggttcaaccatcacacgaacttcacgtcccgcttgaattgcataagcctgcttaacgccttggtagctcttagcaatcttttccaattcggtcaaacgtctaatataattttccaaactctcgcttcttgcaccaggacgagcactagaaatcgtatctgctgcaacaacaagttcagcaataaacgacaacttaggcacatcgccgtggtgtgcagcaatcgcatttactacaacatctggttcatgatatttacgagttagttcaaccccaatttctacatgggaaccttcaatatcatgatcgatggctttaccaatatcgtgtaataaccccgcgcgaactgctaatttttcatccaagcctaattctgcagccatcgtgcctgctagcttaccaacttcaattgaatgtgacaaaacattttgtccataagaagtacgatatttaagacgacctagcgtcttaactaattcaggattcatccggtgaattcccagctccatcaaagcactttcacctgcttcatagatgtcatcgttaacttcttttctggccttatcgaccatttcttcaattctagctgggtgaatgcggccatccttgattaagcgttccatcgctcttttggcaatttcacgtctaattggatcaaaaccactcaaggtaacaacctttggcgtatcatcaataattagatctattccagtcaaagcttcaaatgaacggatattgcgtccttcacgaccaataatccgtcccttcatctcttcatttggtagatcaacaacagatacagttgtttcggcaactgtatctgccgcgctactttgaatagcatccacaatgacctgattagcataatgatcagctttagcttttacttcttcgttactatttctgatcctctcggctcgttctttgactagttcatcagataattgactaagcacaatcttcttggcttcttcctcatccaacttagctacgtcataaagcttttgccgtctagtttctactaattcttcagcctcagttaattttgcctttaagctagcatactgctgctttaattggtcttccttttgcgtgagtccactttcacgttcatctaataaagaattcttatgatctaaggtatcttcacgttgttgtaaacgatttttctcccgagctaaattatctttcttggaatttaactcatcctcggtcttttgcctaaaatcacgaatttgttcttgagcttcaagaattttttcttttttagtattttctgcactttgcttaacagccgctgctgcttgcttttgtgcattaacttcagcttgtgctgcagcaacctgtgccttagcatcagctaaaatgtggtcagcatcattctgggcattttgagctttttgttcccaagaatgcttgcgaattgcataaccaaccactgaacccaccaagaatgaaacaatggcagttgcgacgggaatcataattgttaacatattattcatgattactatcgccttttttagaattattcacacaacttttatgataaagaacctatctgttcatgtcaattaaatcaaaaaaccttggaaaataaatccagggtttttgacataattatttagcttgttcagactttttatctgtagcagcttctttttctgtcttggcttcttcgcgcttctccttgatcttttctggatcttcacgatcagcaattgacttttcatcaatcccgtaagcttgacgcacttgcttttggatatcttgataaatatctggatgctcttctagatacttcttagcattctcacgtccctgaccaattcgatcactcttgtaagagtaccaagaacctgctttatcgataatgtccttatcagcagccatgtccagtaattcaccactttgtgaaattcccttaccgtacataatgtctacttctgccaccttaaatggtggagcaaccttgttcttaacaactttaattttaactctgttaccaagaacatctcctgattgcttaatctgttcagctcttcttacttccaatctaatagttgagtaaaacttaagagcacgaccacctggggtagtttcaggattaccaaacattaccccaactttttcacgaatctggttaataaagatggcaatagttttggttttagaaatattacctgataacttacgcaaagcttgactcattaatctcgcttgtaaaccaacatgggcatctcccatctcgccttcaatttctgctcgtggtactaaggcagcaacagagtcgactactacaatgtcaattgccccactggaaatcaaagtatcagcgatttgcaaaccttcttcaccagtattaggttgtgacaaaattagtgaatcaatatctacacctaaagcttcagcgtaagcaggatccattgcattttcggcatcaatatatgctgcagtaccaccacgcttttgcacctcagctacagcatgaagggctaccgtagtcttaccagatgattctgggccataaacttcaataatacgaccacgaggatatccacctacaccgatagcagcatctaaagctaatgaacctgttggcactgttgaaatttgcgtatcagctttttcgcccatccgcattacagcacccttaccgaaattcttttcgatttttttaagcgctgcatctaaagcagcctgtttttcgtctttggccattaatgtcctcctatttttcgtacctaataattatactttgaccgccgtccaatttgcaagagaaatgcaaacgaacgttcaaaggattttttaccctctattatttattacgctaaaaatcgccattatttttttacaaaataaaaaaagaagcaaatgcttctttttaatcattcttgacttaatactattttacattgagcccttgaatacgccccatgattggtggaagtaatcgtaacctgagtaaatagtaaagatcaacgcaaggtaaagtaagatagtaccaatgtggaagaagtcaccaatcaataagaaaatgattgataacatttggcaagtagtcttaattttaccaggcatctttgctgctaaaacttgtccttcattttctgctaagatcaaacgcaaaccagtaacagccaattcacgacaaacgatgatagctactacccatgctggagcaagtttcaattcaactaagaaaatgaaagcagtcatagttaacatcttatcagctaatggatcagcaaacttaccaaaattggttaccatattacgtgaacgcgcaatgtgaccgtcaaaccaatcagtagccgaagcaacagcaaaaacgatagcagcaataacacgactccaaacaacagttgagcctgctgcttgaacactagcattcccaccaaaaatgatgattaacataaatactggaatcaaaaagattctaaaaacagtaagtttattaggtaaattcattctaacactcctagattttaattgttgttattatttccaccatcattgccattgttagtgtctgctgatgattgagtagtagatgattgttgagtttgactactttgttgggtttgttggctactttgagtagtagtagatgattgttgacgactgctttgacgagtagcactgctttgagtagttgtacggctttgggtagaactactattggttgtattgttattagtagagcccgtattattagaactactattattttgactagtagttcccttagccttaccaatcaacaaagtaattgtcctgtacgcattgtttgctgtatatgggattttcttacctgcaatagtgattgaagtaccattatcgttgcctaaagtaatcactactctctctgcattgcttggcaaagtcatagtgtgcttttgattagcaagtaaagttgattgccagctattagcattaccattgacttgtacacccgctgaaatattttggttttcaccagcacgcacaactaggcgacggtttttattcaagccagtaactcggtactcattgtcactaaccttagtaaccttaactttattgactactacttttttagctttcttagaagatgacgatgatgacttttgtgatgaaacagttacatcattattatcagcttggttcttttgaccacctgaagaaagacgagcatacaaaacgtacactacaagaattacgataattacaccaagtccgatcgcaattcgtggcaagtaattcttccacaaatttttcttattgtcggtggtttctcgtacttcttcactcttattatcaatcgagttttctacgtactcatctggcttagcttctggtacatcatcgtggtaatcacttaataactccttaccatccaagccaacaacttgtgcatattgacgaataaatgctctaacataaaaatcgcctggaagtttatcaaattcattcttctcaatcgcttcaagatatctgctctgaattttagtagctttttcaatatctgcaattgaaagtcccttagcctctctggcgctctttaatttatctccgatatctgccatatttacctcttcaaattttaatttatcatgttgagtataccataaaattctcattacaacgtcttagttataaaagccatccacctgtaacataaattgtctgtcctgttaaataactactacgtcgatctagcagtgttctaacccagtatgaaatatcactgccattggcccaacgaccaactgggatttcatcttttacctcttgaatcgtatcctcagaaaagaatgcattcattttggttttaaccgcaccaggcgcaattacattaaccgttaagttattggaagcaacttcacgcgcataagcctgagcgaacctggttataccacctttagttgcactatagacgctttctaatgcactacctgcaccaccatagactgagcctaaataaactatacgactaaaatctcgtttcatcagttgtggctctaacaatttagttaacttaattggcacagtaagattaatattaatcagatcagtgatatttgctaatttttcatcacctaaaaaaccatacttagtaattccttgagcaaaaactactgcattaactggcaacaagtttttaacaaaatctgttaactgtgcatcccctgtcgcaaaatccaactgtagcgacataaaatcctggtcaggatgcttagcaaacagctcttgaactaaattttcagctttttgagaattagaatgataatgcaagtataatgaccaaccggcatctgccaaatctcgacaaatatcttgaccaataccgccagttgcaccaaagacaattgctcgcttcaactttatcaaccccttacttgttttctaagtaagcagaacaaagttcactgtctttcataatcttttggcagtagtcataaaactgatcaaaattcattgcctgcaatttagctatattttgtgctaaattttcatgatctaaattttcttcaattaattcaattgccaaataagacagatcattacttgtcctagcagtgcgtgctaaccattctttcttttgcaaaatgaagttttgtctaataaaacggtattccgctgaatttttcttaattggttccgtcaataccctctttatttctgcaattacttcttgagcttgaggacttacaccaaaaatagtagcaaaatcgccctgcctggtgtaattaacagaaatctgcagcgaatccattaacagctgcttttttctcatttcttcaaaccatggtcccattgcacttagttttgattctaacattatttctaacagaatttgagtcaaatcaaagcttgataatactttcttaaagtttttaaagcgaattcctaaaccaaaggaattagaattacctctggctggcaagacttgattatgtaacatgcgaaaactaacttgtttttcagctgtgcttttacctttcccgtgcaaatatttttgctgcagctttcctacttgccgcaaaatcgtttgcacttgattatcagaaaaatcaccgcaagcaacaaattgcatcttttctggcacatacttagcctcataaacttgggtcaagtttttcactgtaacttgattaattgattctttcgtacctacaacttcgatccctagattagaatcaccaaacatatcatgcataatcgcattatttacgctccaagttgggtcatcctgatacatggccaattcttgttcaataatcggagcctcttgcgcgatattttccttagtaaaatacggctgccctaccaattcaaacaagagatcgatcattttaggcgtatgctcaattccactacaataaaacattgtttcattaaaagacgtgaatgcattaacgtcagcaccaatatcttcaaattgcgttgacagatcaccatcttttttggcaaatagcttatgctctaagaaatgagccgaaccggcaaccttttgtggatcactactaccaaagtcaacaattataccgaaaaatcgttgataaaaatgtggctttaaaataatttcggctttaaagcctgactgatattcttttttgataatttttggtgtcatcattttaaaacataactttcattaaagaataaattttgtacgaaagctactaactgcttaggtgtagctctcctaattgcattttcacgatcaaagtctaaatatcccgagaacaattcatcacgcaacatttgacccatctgccagttttgaccgtctagaccaatcttcatattacgcaaaattgcctttttagcctttttaaataaatcatcttctacttcgccctgaactagtttacccatttcggataaaataatttttcgagccgctgcaatcttactaggatcaagtcctgcactgactaaaaacaaagaattattggcaaagcagcttgcttcaacattataagctgctcccaattgctcccgaatttgcgtaaataatttagatgattgatcacctgccaaatattgcgataataatattcccattacttgaccgcgataatcaatactttgttctaaaccaaagcccattaacaattgagcttgcacatttccttgatcatcctctttttcaatcaactttcttttagctggaatagttagactagctgtttgaaatgatttagttaaaccagtttgttgaaacatagcctgagctaatttagaaaccagattattatccctggtcattcctaaaatttgcattggtacattagctaaattacgccaataatgcatcatagtcgtgctagtcgcagctttgatttcatctagtgagccaataaatgtctccgcataatcaggttgatcctgataccacaatttaaaaaactgctccaacgcataattagatggttgttcaatcagttcttgatattcttctgctaattgacgtttagcatattccaccaaaggttctgcaaaattaggttgattaactatttgtgcaatcacattaagaatttcttcatacgtataatgtggatccaaaatctcaatcggctcaacaaaattggcataataagtcaaaagtatttctttaccaaaaacttgtggcataatctccagctgtaaatcatataattctgccaatcttttttgttgtaaagcaagtgacggataacttaagctgctattcatctgtattcgcgctagcaaactagcataagctaaattatgtttagtcagcggcaaacgcaaaaaacagccaatagcggctgttgtaaactttttattttttctaattgcaatattagttgtgagcattgtttgaattaccttcattctttattggtggcactaaaacttgtcgtggcttagagccttcagatggaccaacaatccctttagcttccatttcatcaacaattctagcagcacgattataaccaattctaaacctacgctgcaacattgacacgctggccgtctgttgacgtcgtactaaatcaacagcttgctcatagaattcatctgctggctcatcatctttactatcagcatttgatgaattttcaccttttttaggaatcattgtctcatcataactaacctcttgttgcttcttaacccattcaattacgcgttcaacttcatcactagcaatataagcaccttgaacacgttcaggtttagatgccccaattggcatataaagcatatcaccacgaccaagtaatttttctgcacctgtttgatccaaaatagtccttgaatccactccacttgatacagcaaaggaaattctcgatggtacatttgctttaatcaaaccggtaataacatcaacacttggacgctgagttgccaaaatcatatgaattccggcagcacgtgccatttgtcctaaacgaacaatcgcgccttcaacatcgtgaccaccaaccatcatcaaatcactaagttcgtcaactacaactagaatataaggtaacggcttcatcactggtttagttttatcacgattgttttcagcaactttttgattatattcactcatgtttcgcacgccaccagccgcaaatagcttatatctgcgctccatttctttaacaactttgcgcagtgcatttgcggctagcttagcatcggtcaccacagggatcaataaatgcggcacaccattataaactgaaagttcgaccatctttgggtcaattaaaactaatttaacttcttcaggccgcgccttcattaaaatactggctaaaattgtattaatcgctacggacttaccagaaccagttgaaccagcaatcaataggtgtggcatcttagctaagttggcagaaataatgcttccagttacatctttacccaatggtacatccatcggatcgcttttggctttattatcttgatgttccatcacgtctttgaatgaaacaacagacgttgctcggttaggtacctcaattccgataaagggcttaccaggaattggtgcttcaattcgaatatctttagccgcaagcgccaaagccaaatcatccgctaagtttacaattcgacttaccttaacgccaacagctggctggacttcataacgcgtaatagttggtcctaaaatagcttttttaataatcaccttaacgccaaaactcttaaacgttgattgcaaaacttgggtatttttcttaattaaatcacggtcagtactctgatcagtcgatttaattggatcaagtaagcttaaaggtggcatcttataagctttattgactggcgcatcagtttttagttcaccatgatcgacatcggctaattcctgctttaacttttgatcatcttccgcaaaagaatgtgacttaggtagttcctttaccccgtcatcatgttgtggtgcaatttgaatttgcggttctggatcaggtgtggtctctggctcaacttctacgtcttcagccgtcggcgttacatcgtcatcagttggatcggcagggtcaaagtctgctacattaggaaaaatcggtttatcgtcatcaactaaatcttcgtcttgttcctcttttttctgacgccgcttttccaaaacgtcattatatttatctttgacctttaccccagcttctttattctttttgatgaataattgactaactgtctggaatttttcgataattgttctaaatttaacatcaaaaaacatcaaaattccaattggcagcaataaaatagcaaaaacacggacaccgatttgccctagtagtggataaaaaagttgataagctaatgaaccaattaatccaccaccaatgctctcagtgactccagcacgaccaaactccgcggccattgcatgccaaaaagaattcaggaaattactgttaactaattcatgttcaaaatacaagttacattgaattaacagaattcccaaaaaagcgattgctaaccccaagctacgcttaattgttaagtgaatcggttgattatagattaaatttactaggccaaaaagtcccagtaaacctgccgcaaacaaataagaatccccgaagaacattcgaatcaaatttgcgatttgcttacccaaaataccgaaacggacaaaagccagccccgctattaaaatcaagactaaaccacaaatactccaattaagattttgctttttgtttgcttttcgcttattgtagctctttttggcctttctttgtttcttttttgcaggcatgtactcacctgattaattatcgaattcagccttgaagttcaagttaaccggctgacccaaagttaattgggttgtttcatagatcaaggtctcaagttgctcaactaatggtcgagttagtaactgccaatctgaattactaatgtcagagccatcaccatggtaatcttttaattgcacgatttgatgaatcaagccgcttgcttcaaacatagctggtgcaggaattacatcatattgaatagcaacatcatagtaactaccattttcttctgaatgctcatcgtcaccgctaacatctaattttctaattcctggtctaacgtcactaattggtttggtatcttcatcaactaaatcataatgaaatgcctgtacgataatatctgtctgtttttcaaaatccattatttattctcccctagattacgttcatatctttcaggacgatcatagtcatcttttaacttgtcattttcataatgatgggttgtttccatattaggaaaaccttgctggcgtaaagcttctagcaaaaccattgctacagaattagacaagttataacaccgaatgttatcagacattgggatacgtaaattacggtcatagtattcacgcataaaagtttctggcaaaccagttgtttctttaccaaaaacaaagtaataattcttgttcggatcagtataatcgacttgtgcataattttttgatgagaatttagaaattaaatacatctcatcattaggccctaaagtcttcaaaaaggcattcaagtcatcatgtctgcgtacatcgaccttatcccaataatcaagacctgctcgcttcatttttttattatcgatttgaaaaccaagtggttcaatcaaatcaaggacagtgttagtccccgcacaagtacgagcaatattgccagtattagctggcatcaatggttcatacaaaactacatgattagtcattcaaaaaactccttatcaaaaaaagcgtagcttttaagccacgctttaaaactatctagtatttattcgctttcgtcatgatctgcatcccccgtggtcgaagaaacagcattctcttcaaagagtttagactctcttcgataataattgtacacgcgagacacaataatcttcaagatcgcataaattggaataccgaaaactacaccccataagccccagacggcactagcaccaatcaagagtaaaattgttgtaattgggtgcatttccattttattccccattacccatgggctaagaattcttgattcaattgtttgttcaatagcaaaaacaattaagaccttaattaacattgaacctgaagtcataattgaaattacaattacaggaatcattgctaatggtgtaccaaagtatgggattaagttcataaacccagctaaaattgccaaagccacgccatatggtaaaccaattagaatgtaacccaatgagaacatcacacctacccaaaaggcaacagtaatttgaccacggacatatgaagcaacagcatagttaatatcatataataatttgctaaaactaggttgccatttttcaggtgcaaacttggtaatatatggccgcagttgatgaccatcttttaacatgaagaataaaataaacggtgcagttaacaaagtcatagccaccattgtaataatgctgacggcagatgaaatattgccgatagttgcattgatggtactttgtccagacttaaataaggtcttctgcgtattatcaatcatgcctttgatactgcctttaaatgaatgtaaacgcggatcttgcaacgcattttgtgttgcattaaccgcatcattccaaatatgaggccagttctttatcaatgaattaatctgattctgtgcaattggaaccaagatattaataatccaaattaatgcgacaactactagtaagaataaaactataattgtcaccactcgcggaatcttaaattttctttcacaccaatcaacaaccggattcatgatatagtactgaattaccgctaataataatggcggtaaaattgcactaaagaagatccaggcaggattcaatacaaaagatactttattaaagacccaaataattaaaaagaatagcaggacgtttaataaaacaatactaaaacgattatctaagaaccattttttaaaaacagttccacccctatgttggttattttccatctattcatcctaatttttaaatgtgttcataaacaatatcatcatcaaccttaaaattaggtaatggttgatcaatatccggatcaaagtagatcgcattagcaagtggcgtcttagaaacggtacggttaaagaacaaggttgcgtgtcccaatgccttcatgttgctctctaccatcggaccaacatagtttgcaacataggtttgaccatcaacagtgattgtatcaccttttttaaaaacaaaaccactaactggcgtctcagtactgaatttttgaatgacagaaacgtcttccaaatccttattagcaccctcgccaaataaaattaccatgccatctttattatcgacggcctttttaccaatttttttaatatttgcaatccatttcataatataatctctccttaaaaataattttagcataagaaaagctgcttaaaaacttaagcagcccaaaatcggcgattattttttgctcaacaggaaatcgtgtttttaagcgtctaatccgctttcatgctatactttattttagacttatttttatttagagatggaggcccacatatatgaaggttttaatcggaggttacaccaaaaaaacttccaaagggatttatgaattacctattaccggtgcagcaaatgatgcccgtttaggcaaagctgagaatattattagcgttggtggtccaacttatttccgaaaagatggtaatttaatttttactgttaataacgctggcgataaaggtggaatcagcgtctttcaattaagtgatcaaggcgcaaacgaagttgaccactatttaactccaggctcttcgccagcttatgtaggaattaaccgcaccaaaaagttgatttacattgctaactatcatactgctgtcttgtccgttttccgctacaacgacagtggcaagctcgatctagttgatactgtaactcacaaagctgaaacgttgggtccgcgtcctgaacaagttgacggtcctcaccctcacttctttgatgaaaccccagctggtaacttggttagttgtgatctaggcaatgataccgttgatttttatagattagaaaatgatcaattaaaacacattgctcaatataagtgcgaaactggctttggtacacgtcatatcgtcttcagtaaagatggcaattacttctacgttgtcggtgaactttctagtcaaatcaatgtcgttaaatttaacgaagacacttgggactttgaaaatattgctacttataagacaattcccgctgattttactgaccataacggagctgctgccttatatattagtcaagatggcaaatatgtttacacttctaacaggggacataattcaattgctgtcttcaaagttaacgacgatcatactttgagcctggttcaacgtgtatccacttttggtgacttccctcgtgattttaattgggataaagatcagcgctacgtcgttgtcgctaatcaaaatacagataatgctactctttacacaagaaacgctggtactggtagcctaactcctattcaaaaagaaatttccgtaccagaaggcactcgcgttcttttcaccaaatagtaattaacattagtaccaaagtcatggcgcaatagaacgtcatggcttttttattcctacaacttaaagtaaaatagaaataaatgaaacaaaatataagtcatgtggtaataagtcaaatgaaaggcgatgatatttgttctttttgatcataaatttgagtatatgaaactaagccttggtaaaggttgatttttttaatgttaaacttttgtttacttttaaatttagaccaatttttgaaattaagacctcggtgtcctgtacagtttgtcatctttgagcaatttaaagataactcgtactaattttcttgcagttaatgtgcaagcacgtttatgcggcgagtagacagcttcatcatacttcttttggtaatattttttgaaaacaggatcatgtaatcttgctagattggcagcttcaatcaagtaatatcttagatatctgtttccagtcctggccattggagtatgttcgttgctgtgatctcccgattgatattgattccaggttaggccggcatacttagccagctgttcttctttatcaaagcgatcgatacttccgatctcagcgataataccagctgtataggttttgccaataccgggaattgattccagaattttgctttctggtaatgcatcaacgatacgatcaattgctttttctagatctttaatagattcattaaagctttgaatcatgttgtaatgaacagaaagcactgcatcaattgaatcagtcattactttgcctaagcgatatgaacctctaacagctttcttaattgctttagccaaggtatctggatcggaaaagcgtcctctgcctttaacctgtaagtaagaaattaagtcttcggtaggcatatccgcgatctcatccagagttttactatcggttacaatagacatcattgtagcaccgaaaagaggagtattaatcttatctttatcgacagtgattagtttattaacccgataatataaagcttcaatgaagtgctgtttggtacgagtcagttcttgaactaattcatatctggtacgcgttaaacgctctaaagcaagatagttgtcttgtctggcaatgcttactcgataatgtccaaagcttagatacaaagcaatgtaataagcatcgagaggatcagttttactttcttcaaagactttatgaaacctgctggtttctttggggttaattacatcagtctctacattgagcttttgtaaatcttcgtcattttggaaaaagtaagcaggatgaaaactgtaaatagatgtagcttccatgccaataatgatttgatcatagtgtttattttgagctagatctaaaatttgttttttcagttcactagcaccataaagatcattgacaaagctatcgttaattaagcgtttgttttgatcttctgaatcaagtgcaacgacctgtaaatctttagaactaacatcaataccgacaaataatttcattggaaatggcctcctttctttcaaatttctgatcatagattttgatcttcacatgttaacccctaattacagttcttaagttcaatctcgccagtataagtattcactggttgcttctttgaaagctgcacctaatcccaattgctcaaggactagcaaaaagaagcaatcaatacagcatgtgagttagagcataaaggaactgtctgggtggcagacttataaagcagacaaaactgcaggaggtgataacctagaccagttgaccaaagccaatgacaattagaggctaacatgtgaagatcaaaaagcaaatactaatttgattaattatcacaatatgactaattacaatttatataatacgagaaggtgacaaagtgaaaagaaaaataattcgaatattacttttcattcttggcgggatattagggttactacttctgtataaactctatttaaattaccgtcctgaattgaatttattacttcattttgatcaccataatgaagaagtactcgttaacatggtccgtagccatggtattgaagacttagcctttttatttttacttaatgcgatctgtgtagcaattcctggcttatccaacggaatcttttgtgttctcaacggaatcctttatggccctgcctggggatttattgttaattggatcagtgacattttaggccaaataattttaatggaacttttgcaaaaactctatgacatgaaaaagatgtctaacagtaaagtttataagttattgactggattaaaatcaccaatgcttggattaattattggatatatgattccatttattccgagtgcgacagttagctatgtcaacattatgattaataaggagcaacgtaaaaaacagctaataccaatcattatcggtgtcatccccttcgcttacttatatgcttatggtggcgattcaatcttgcacttagacggaacacgattgattaaagttgtaatctcattcgttgtcattgctttaattgcagtagctattttgcttagtctgagagcaatcaaaaagcgtacaaaaaaagcttgaatttactcaagcttttttattatgcctagcatatttaaactaagttagcttcttctaacagttcttcgacccaagttctcttgattttcttcatccctgttttgagagctaacttctcaggtaatggcatctcttgatcaactaatttcttcttgtcagacatgtagtacatcgcacgaagcaattgacgaatatcataaattgagtcaaatacttcaggtacaccacggtcaacgttaagcaatgtataaacagcttccatggcagttctgacagaatattcggtggtaaagacagtgtctctagttggtgattcggcaaaattgccaataaaagcaatattaactgatccttctggaacaacatctggacggtccccatcatgacgaggcataaagtaactagtgatatatggcatgtaaactggtacggtattcatattttcttcactagccaattcgctgatttgactctctggcacgcctaagtgatagagcatttcctcggcaatttctttaccagtacagtcaacgactctcttcttgatgtaattaccctcagtatcagaatacaaagcataaatccaaacaacgatttgatctggattctggctcttaaagtgaggttgacggtgaatagtaaagctaagttcccaattagagtcaacaacagtgataattccaccagtattaactttaccatcgtaaaggctgcgcttagtcaagcgttcaaagtatggagctattttcttattttccaaggtagctgtagctgatacgaaccaactacgctctggcaagttttcacagaagacatctggatgaccaaagtcaggatcttgtttagccaaattttcccataatttccatgaagagcccttgtcgtgagtaattggtgctggggtattttgatcaccataagtagaactttcagtgattgaaccgttagtcacaaagacaatatcatctggggttaaatcaatatcactttgctcaccattcttggtcatcacgatcttcttggcaaccttttgcttgccctcatgatcaacaaccacgttatcaacgtgacaatcatattcaaattgaacaccgtgatcttttaaatatgccaaaagtggcttaaccatggactcatattggttatacttgttaaacttcaatgcggtaaagtcaggcaaaccatcaatatggtgaataaagcgcattgcataacgccgcatttcggctgctgagtgccatttttcaaaggcaaacattgttgcccagtatgtccagaaattagtcttaaagaagtcatcactgaagaattcttcaattgtttcaccttggagttccttttccggtgtcatgattaacttcacgatttcattagcgcacttacctagaccatattgaccatcacttggtaagcgatcaccgcgattataaattagacggcaattggatgagttaggatcttctttatcaagccaataatattcatctaagtatgatgcgccagggatttccaaacttggaatcgatctgtacatatcccacaaacattcaaagtggttctccatttcgcggccgccccgaaccacgaaacctgcattaggacgcttagcaccatcaagtgaaccaccagctacgggtagctcttctaagatatgaatattttcacccttcatttgtgcatcacgaactaaaaagacagctgcagaaagaccggctaaaccactaccaataatataagcagattttttatctacgcctgcgggctttttggcatccgcaaaagcctcataattaccattggaatagtacataaagatatcctcttttctgtataagtatagtttttaacattacactttaattataaagaaagcggttactagatgcgagttttttagaagttttagctaataactttagaattctttattaattagtttctgccacagttcttgcatatcttttggatcattcaactcaattgttttacatttttgttggctaaatggatccggaaaatttaaataaaagcaatttaaggcttggcgtgaaaacccatcttgaattccatataaaggatcaccatataaggggtgtcccagataagccatgtgaacacggatctgatgggttctaccggtaagcaagcgtaactctaccaagctagcacctgtaacctgatctaggactcgatacgcggtttgagcgtcctttccatctgccactaccgcacgtttaaccccactaccctttttgccaatcggttgatcaattaaaccagttaactcattcggagcaaaattgccatgtacaattgcatgatattttttgacaaatttctccttgccaattttactaaaacgagcatgggaaattgcatttttccccaccaatactaaaccagatgtatatcgatctaatctagtaataacatgcggcttcaaatttttctgtcctttttgggcaaaataacccaacaatcgattgaccaccgcatcatcatcttcatagcgtgagggaattgacaacacacctgcaggtttgttaactacaagataatttttattctccaacacaattgatactggattattcgatggctttaaaaaatcatttttcttttcttcaccactgataaaaatcacttcatccccagcacgcaaattaaagctagtatatcttcttttatgatttactaaaatcatgccatgatggtgtttagcattgtttaacgcttgatgcgaaaaaccattttttaacaaaaaaggacccagctttttggggtctctttcttgcacaattagtttaaataaactagtcatttttttcattatctccaataaacgcattttgtacgcgtgaccaaaaatgatggtggccaaattgatcaaactgaatcgaatgccgcgaaattcgatattcaatcttcttagcattacgtacatcaattcttgctccatcaactgtcatcacaaaatgatctgcattaggaacaatcgaaatccattgatcaggcgcaatcacaattggtgatgacaaagttctaaaaactcgattattaattgaggcaatttcagtcatttgcaacgcttttagccggggatgaattactgcaccacctagtgatttgccataagcagtcgaacctgttggtgttgaaacgcaaagaccatcgcctcgaaagttttcaaataattgatcattaatgtacacatcggcctctaatgtatgtgaaactcttttaactgctgattcattgacggctaaatggtaatgagtttcacctgattcagtgagcatctttatttctagtaaaggatacttcgctggttcacccttggttactgctaaagcatcaaccattttttcaatatcatagttacgccaatcagtataaaaacctaagtggccagtatgaatcccaataaagcgcacagaatctacttgattttcatagcggtggaaggcattgatgagggtgccatcaccgccaacagtgatcactacatcaggatatctagcatcaaagataaagcccttttcctgaagcagcttcttaagctgcgcaactgtctttaacgtttcatcgtagttattatgcgctattgttactttcataatttttctttgcccttatttttggtaaaaattttctgagcttcttggacctcatccttaattgacgacatttcttcgtctagtctataagcggcttcagccgttgattttaatctagctgaaatgtcatcaggatagacaccttgatatttgtaatttaaagtatgttcgacagtagcccaaaagttcattgccatagttctaatctgaacttccgcaattaattttttcggaccttctggtaagtaaaccgtatagttaatcaccatgtggtatgaccgatatccactcggcttagcattttgaatataatcacgctcctcaacaacttccatatcatctcgagcatgaatcaaatctactaccttataaatatcgtctacaaattgagtaacaatcctaatccctgcaatatcttgcatatcagtctcaatgacatcaggactaattactcgccgtttcattttttccttgatagaatcaactgtctttacccggccaattacaaattcaataggtgaatgttctcccttagttaaaaagccttgtctaagggaacgaaatttaacctttaactcgcgaacagcttcgttataaggccacaagaagttatcccaatctaattccatgagaaaacattcctttcttaagcaaacaaactcattttaccatataattaagttaaacagttcggaggaaaaacagatgagtaaaaatcgagaaattgaagcaaaaattcttttaaataaaagcgtttatgatcagatcactgccgcttttccaatcaaaagtgactttacccaagaaaattattattttgatacagcagatgatttattaaaaaatcatcaaattagcttgcgtattcgaatctatgctactcacgcagagcaaacaatgaaggtaccggatcctaatcctgtacaaaagaatttccatgaagtaattgaaattaatgataaattaactcacgctcaagctaaaaaattagtagcaaaaaagcattttaaatttactggtaatattggcgcatatctagataatcattttgccaatgaccaaaaaaagctacatcttttcacctggagcaaaacccgcagaattttgatgaacgggccacaaaactgtgaattaactctagatgctacgtcttatccagataactatcaagattttgaattagaaatcgaaaatactaatcctgctttaattcaaacagtattaactaaacttgaacaagaatatgactttgaacaaacggctgctaacactaatcaaagcaaaatagctcgtgcaagcgctcaccaaaaatagtatatagaaaataaggcatattttttgtcacttattttttttcttgctaaagtaactaatagtaaatcaccaaagaggtcgagattatgtttgagatttttctattcatcaatccaatagggatttattgttatgacactgaaaaacagattcgtaaaaccgttgatgaattaggggtcgacgtttgttatcactatattcccattgcaaatgtttgtttaatcaatgatgatgcgattcgccgacgcaaagatgaccagaagttgcctgatattagtaatttttctagagcaacttatgaagcattagaaaattaccacgcgattaggctggcctatggcaacaaaaaagcccgtcaatacctgtatgaattacaaaaaaacttgagcaaagatgcttcagcttatacacctgagctgcttaagcggatcgcaaacaaattacatatcaaggatgcggatattcaggcaatcaaacaaactgattacctgcgtacttctattgaagaagatcaaaaactagccaaccaatggaatattaaagctactcctaccaccgttatctttaacgaagacaacgagcaaaatggagtattgctagagggaccaatcaatcaacaggatttagttaatctaatgcttccagattgtcaaaagtgtttttcagactatttacctgcggagcatcatttacgccttatctaaaggcgttttatttttgcaaaaaatcactcacccgatctctttcacctgggttacgccaagtagcaaaaactttatcaggtaaatcatcaagagttaatttgcgttcataaagcatctctcctattttcaatcctaactttgttttttgcataatttgctggcgtaaatattttctttgagttgcaatgttcaaagaatattcttttttgaatggcttaaagcgccaaaaatcttttatccccaattcatcaaggacaaatgatttactttgataaaccaatttattagctaccggttcttctaaaacattatattttaagcaaaaacgatttctctgtggattaatttctaaatagtaattcccccaagctttattttgtcgaaagaaaatcaactgtgtgcgtttcaatcgccgtttcaaatagtgtcgctgtcccacaatccaaatatcttttacaccaattttttgataaagctgatgccgatggttaaattcttgttgactcaacggcgcacattgaacttcaaacgctaacttagcagttgctaagacatctgcacgcaattgtccttcagctaatggaatctcaacttctgccggaaaaccagctgccgtcaaagctgacttcaacagcattttcgattggtgatgctcctctttttcacccattaaattactgtacttcacaagatgcttaaaaaaggctgctttttgctccgacataaccaaaatcacttttttattgcaatgtggacagtgataattatcacgattcaatttcttttgccttgcattaactaaacatgcttcgtcaactgcaaggactaatttcttatttaacatggctgcatacatttttctcacccatgttttattacgtaaaaaagagacggaattttgtcccgtctctttttctttaaagaatcttaataattagctgcttttaaaaagtaatgtcgaatctggcctaaagcattttgcatcaataagcatttgcctgtttcttcaactacacgcatcttatcactatcgaccttaaaaccaaattcgttggctattgtccacgcatctgctggtttaagctcctcatattcttcatcaagaaatgccaaatttaagaaatattgtccatgcaagtaatacaagctagaagctaaatcatttgccttaaggttatcagctaattcaattagactacctaaatcatcaaaatagtaagcctgagtcttgcgcgatctccaatcagttggctcattgtttttatcatcttggttaaaaaagttgtgagtagctggtccttgaggagccgaatttgaattcgtactctcctcatctaaatcaaagaaactttttgaatcatccgaattcgttgatgattgctcatccttaggaaagctatcacccattagtttccttaaattctgtgcatcgtccggcttaactttggtgatcatcaaatctaatcccccattattaggcattacttgaaatgatactggatcaccattggcaaattcatggtcttcatcgacctcatcaagaattttatagaagaagtcttgaatcttttgtctattacctaataaatcaagcattcccatcccacgacgagccaattcagctttatcaattcgaactctgatagtattcttatcaatatgatctacctgcacaggatctcacctccatgaattaatatatctattgtagcgtatttttcgtttaaaataaaagtgttagtctcaacaaaagccttaactaacacttttcaatcattttataaatctgcaatcttttgtgcttcagccaattccaaccgacgaacttttcgttgcaagaatcgacgaatttcatcttcattgtaaccaacttgaagtcgacgatcatccataatgattggtcttcttaacaaactaggattcttttctactaaatcaagtaactgatcaattgataaatcgtctaaattgattcgcaattgttgaaaagctcttgagcgggtagaaatgatttcctcagtaccattttcagtcatccgcaagatctttaataattcttttttagtcaatggttcagaaaaaatgtttctttccttgaatggaatattatgtttttcaagccacgctcttgccttgcgacatgaagtacaactaggagagacatataaatctaccataaaaatcacgctcctcagaacaaatatttgtatacgtttctttactcatagctagtataccatataagcttctttttcgtaagtgcttaatttatcgtttacctctgctatttacttaatactaaagataaaacgtgaattatttgtgaagatttcgttcgttttgtttaaaattattaaaaataaaaaaagagacatcacagtctctttttgcaaattaaaactacttgttcaattttttcattaaattattaactaatttttcgttgtcttcagcagtttctgatacataacaagcttcgttagctaatcccttaatgtcagcagtgttcaatttcttcattaagcttctgatacgcaaaattgaagttgcactcattgagtattcatcaagtcccattgaaagtaagattgggaacatagtgttatcaccagcagcttcaccacacataccacaccaaataccgttttcatgagcaccatcaatagtgtgcttaatcaaacgaagtactgatgggttatatggttggtacaagtatgacacattatcattaccacggtcagcagccatagtatattgaattaagtcattagtaccaattgagaagaagtcaacttcctttgcaaattgatcagctaaaacggctgcagcaggtacttcaatcatcataccgacttgcaagtcatcaccaatcttaacgccttctttagcgagcttatctttttcttcagctaaaatttgcttagcttcacgtaattctgctaaagtaccgatcattgggaacataattcctaatggaccgtatgcagatgcacgaagtaaagctcttaattgagttctaaagatatccttgtattgcatagaaagacggatagcacgaacacctaagaatgggttcatttcttctggaagatcccagtaatcaaggtgcttgtcaccaccgatatcacaggttctgataatggtttgtttaccattcataccttcaataacttccttgtaggcatcaaattgagcttcttcagttggaaagtcactagagtccatgtacaagaactctgttctgtacaaaccaatggcttccgcaccattatcctttacacctggcatatcattaggtgtaccaatgttagcagcaatgataaatttcttgccatctgcagtaactgatggttcattcttaagcttagcccattctgccttttgcttaaggaatgcttcactcttttgcttgtaatcagctacttgagcgtcacttggatcaataattgcatccccgtcaagaccatcagcaattaacatatcgccgttcttaacatccttagtaattgagtcagtaccaacaacagctggcaattcaagtgaacgagccataatagctgagtgagctgtacgaccaccaatatcagtaacaaaacccttaacatactttttgttaagttgagcagtgtcacttggagttaagtcgtgagctacaacaattacttcatgatcgattgaagcaggatttggtaattccttaccaagaaggtgagccataatacgctttgaaacatcacgtacgtcagcagcacgttcttgcatgtaaggattatctgtcatcccttcaaaaatagcaataaacttcttagcagtctcatcaagagcagcttctgcgttgatctttgaatccttaatttcattctcaatggcaccagtaaattctgggtcatttaaaatcattaagtgtgcttcaaaaacttgagcttcttcatcgcccaagctttctttagcaatatcatgaatcttttcaacttcagcagttgaagtcttaattgcatcgttgtaacgagctacttcagcttcaacatcagcaattgaagatttagagaatgaaagatcaggctccacaagaagatatgctggagcaatagcgataccatcacttgcagcaattccttttaaagtcttggtcattattcagctaaaccttcttttttcatagtgtcggcaattgcgtccaatgcgtccttttcgtcatcaccttcagcagtgatagtaacatcagcattttgaccaacaccaagtgacataacacccatgattgacttcaagtttactgacttaccgttgtattccaagttaacatctgagccaaactttgaagcagcttgtactaaaagagtagctggacgtgcatgaatacctgtttctgcaatgatatgaaaatcgcgtttttccattataaatatctcctttaaattgaaaaattaaactggtaataaatacccattcgagtattagattatcatgtttttacagattagacaactgcaatgtaacagcttacattatttattcatcggtattcgtagcggtatacacaatcgcgccgcctctttctgccctaccggtaatatattgtctttttccataatttctaatagtcttttgaagatcaaacgcatcttttggctcaactttatactcttttatctcacctgagactaattgatctagaattttctgataatccaaaaatatcaccactcttttaaaattttataatttttccactattaattctactatttatattcaattttcaaaaatattaatattttgtttgcggtaacaaaagcatttcttacaaaaaataagtgtttgagtcttagcacttgactaccaagagtgctaataatataattttggtacagttgaaaagaaaggcggtactatattttgctttgccaaaattgtcatgagcggcccgcttctattcaccttttcactaaggttaatggccaaagccgcgaaatagatttatgtcaacactgttatcaagaattaaaaaatcaacaaggaaatcaaggaaaaatgaataataatgaattttttggcgactttgatgatttattcaacgcattaaacggaaataacaacaatgccgcaaacaataataatgaaatgagaaataacgaccctagaatgcaaatggggggaggcgctggtaatggtggtcaaaacggcagaagcctacttgaccaatacggaacagacttaactgcccttgctaaaaaaggcaaaattgacccagtaatcggtcgtgataaagagattgctcgggttatcgaaattttaaatagaagaactaagaacaaccctgttttaatcggtgaagcaggtgttggtaagactgccgttgtcgaaggcttagctcaagaaatcgtagatggatcagtaccagcaaaattgcagaacaaacgaattatttcattaaatgttgtttcacttgttcaaggtaccggtattcgtggtcaatttgaacaaagaatggaacaattaattaaagaattacaacaaaacgacgatatcattctttttattgatgaaattcacgaaatcgttggtgccggtaatgctgaaggtggcatggatgccggtaacattattaagccagctttggctcgtggcgaattgcaattagttggtgctactaccatcaaagaataccgcgatattgaaaaagactctgctttagctagacgttttcaaccagttgaagttaaagaaccttcaattgacgaaacaattcgcatcttaaaaggtattcaaaaacgctacgaagactatcaccatgttcactacactgatgaagccattgaagctgccgcaaaactttcagcacgttatattcaagatagatttttaccagacaaggctattgaccttcttgatgaagcaggttctagaatgaacttaaccattccttatattgataaggataaaatgcaagaaagaattaatgccgcagagcaattgaaggaagaagccttaaaaaacgaagattacgaaaaagcagcctactaccgtgatcaaattgaaaaatatgaaaaggttaaagatcaaaaggtagatcctgacaagtcccctgttattactgataagatcatggacaagatcgtagaagaaaaaacagggattcctgttggtgatattcaaaagcaagaagaaaaccaactgcaaaatctagctgctgatttaaaggctcacgttatcggccaagacaaggctgttgaaaaagtagctcgtgccattcgtcgtaaccgaatcggtttcaacaagtcaggccgtccaattggttcattcctcttcgttggtccaactggtgtcggtaaaactgagttagctaagcaactggctaagcaaatgtttggctcagaagatgcaatgattcgtttcgatatgtctgaatacatggaacaatactcagtttccaaattaattggttctgctccaggttacgtaggctacgaagaagctggtcaattaactgaacaagttagacacaacccatatagtttgatcttgcttgatgaaattgaaaaagctcacccagatgttttgaacctcttcttgcaaattcttgacgatggtcgtttaactgactcacaaggtagaacagtttcattcaaggataccatcattattatgacttctaatgcaggacaaggcattaagaacgctagcgttggctttacagcagaaaacgaagatgaagctaatgaatctgctagaaataatatgagccaattctttaagccagaattcttgaaccgtcttgatgatgtaatcgaatttaatgaattgactaagccagacttgcttaagattgttgacttaatgttgcaaaataccaacaatatggttaaggatcaaggcctacacattgatgtaactgctgctgcaaaagataaattagttgaagatggctttaatcctgccttaggtgctcgtcctcttcgtcgtaccatccaagaagagattgaggataatgtggctgatttcaaacttgatcatgcacaggctaagaatttaaaagccgatgttgttgatggtaaaattgtaatcagtgatgaagcaaataatgaataggatttaataaaagacaaagtccaagttataccaaaagatttcgaagcaatattagaaatcttttttcttaaaaataaaaatatgctactcaatttgaggtatactaaattagaagaagtaaagctaacagaaacaggtgaattccatgcatttaattgatgtaaccaataattactctgatttggttcacagtcagctcaacactaccgatgcaaactatgttaaagtttattctcttggtaatacttcagttatttatactgaaagtaaggattctatcggtattgtacttgaaaaccatgaccgtcgtgttcgcgaagatgagattgaattcgtaatcaagcgtttaattaaagattatgattcttcatacactttgactgtagacaagagtcgtcatgtaatcgaaattcacgttgacaagtaatccaaatattgttgtatcaaaaaaggaggattgattcattcaattctcctttttctttttgctttaaagtttttctgttaattcaacatctggatatttgtcatggaagaaacgttccgcaaattcattttcaaataagaataatggattaccataacggtccttaactaataagttacgagtattagacatgcgtgggtcaagctgttccggatcaatccagcgcgcaacacgatgaccaatactgttcatttcaacttcagaattatattcattcttcattctgaattggaacacttcaaactgcaattgaccaacagcaccaagaatatactcatccgtttgataattgcggtaaagctgaattgcaccttcttggactagctggttcatacccttatggaatgatttttgcttcatcacgttcttagcagttactcgcataaataattcaggtgtaaattctggtaatggtggataaacaatcttgcgcttaccagcataaatactgtcaccaatttgaaaattaccagtatcgtataagccaactatatcgccagctaccgcatcagaaacttgtactcgctcgcttgacatgaattcagtcgcattatttaaacgaattggcttatcagttctagctaaagttacatccaagcctttcttgaattcaccagaaccgactctaacaaaggcgattcggtcacggtgatgaggattcatattagcctgaatcttgaagacaaagcctgaaaattctggatcttctggacttagctcctcatccccattaactgtgtgactctctggtgctggagccaaatcaacaaagctgttcaagaatgtctcaaccccaaaattggtcaaagctgagccaaagaagacaggagtttgatcacccatagcaatcttctcgcggtcaaacttgttcccagcttctttaatcaaatcaatttcatccagagtatcctggaattgaggatcttgactaagtggctcactatcaggcaacttaccatcttgatctaatggtaaaaagcgatcttgatcatttttgcggtaaagctcaacacgattattagcgatgtcatatagaccctttaaagtttgacctgaaccaattggccagtccattgctacaccctcgataccaagcaaatcttccaattccgcaattaaatctaatggtggacgtccatcacgatcaagcttgttcataaacgtgaaaattggaataccacgttgcttaacaaccttaaacaacttctttgtctgtggctcgatacctttagcagagtcaattaccatgacagctgagtcaacggccattaatgtacggtaagtatcttctgagaagtcctggtgtcctggcgtatccaaaatattgatacgtttgccttgatattcaaactgcataaccgaactagtaacagaaatcccacgcttcttttcgatttccatccagtcactagtagcaaaattgccagttttacgtgccttaaccgtacctgctttacgaattaccccaccaaacaaaagcatttgttcagtaatcgttgtcttacctgcatcggggtgagaaataattgcaaatgttcttctcttttttactttatctgctaactctttgtccattagtcctcgctatcttcttccttttttgattcatcaatcgttaataataccgtcaacaagcgtgaccccttcatccttctagtggtcaaagtcatcccatcaccaatatcaactgttaacttttcttccttagctggaatcacttttaaagtattgatcacatagcctgctatcgtatcaacatcttccatttgaagattagtaccaaattgctcattaaaatcatctaatggcatcttaccgtaaataatgtacttatttgtagctatttgattaaaaagaatctcagtgtgatcaacctcatcatcaatatcgcccacaatctcttcaaccaaatcttcaattgtagctaatccagttacaccgccatattcatctgtcaaaattgctaattgtcgttgcgtttgctgcatttccatcaacaaatcgcccagctcggcagtttctggtgcaaacagcggctcagtcatgacatctttatagtcaagattatcaaaacccttttgtttagcctttcgtaaaaccgttctgatatgaataatccctacaatcttatccttatcacgttgataaacgggaattctagaatatggctcacgaaggatttcatctagattgtcttgaaaactgacttctcgatcaaccatgaaagcatccgttctaggtaccattacttcacgggctgtcttaccctgaaagtccaaaataccttctagcattgaaaattctgtatcatcaattttatgactttcatgtaaagtaacaatttctttttctaaatgatctttagtccccacttttttatcgccggataatctattttttaagcgaccaaacagagttcccgctccaggatcactattcattttcgtactctctttcttaaaaaagttatctaaatatagctattatagcatagagccaataacaattatgttaaaatagcacataagactaggaggttcgtcatgaaaaaaagtcatgtcttactcgtttttacatttcttttgctaattccctatatctgtagcttagctattattggaatcggctataatgcattagttttacattcagctgaactttatcgcacattaatcggctcattagttggcgcaatcattatgtttgctgtcaaggctactattcaacggcctgttgatttattagctgttcaaaccaacgatggcttactgaagcagcttttacgtttcttcagtatcagacgacgctactggcttttagcagctaatattatcttagactttgttctttgctttgctgctacctacataatacgtgctcttttaacacttgatcaaatcgtaggcggctccatcggctttgttttgttaatcatgtttgtttcaacttgtcttggcgcttatgttgaatacgataacctgtcaatcgaccctgagcagcattaattacttgctggccttcaagtacattacttgggccagtttttttgtatccatgtcaagatcccaagtaatatatggcgtgtcactgtcacccaaattttcatgtacttcaattccgctagcaactacttttttggcaaaatttggcacggtactagtcaacggtaagttgaaaaagactaaagtttgattctcttctacttcctccgctacctctgcagctggtaattcaaacttcattaaacccgttggcacttcatcttttgctacatctgctaaaacgccataccaatacataaagctgtcctcacctgataccactaggacagaacgcttattttctaaattatgatcagctaaaaatttttgaaaagtttcatcattttccatttgctgattagcttccataaagctcttttgagcattcatcaaaccagctggaaatggacgaccaataaataatcttgattcaatatttttcttcattttttctcctaatattctactaattcgtctaaatcaattatttcaccgtttaaaaaggcatcaatctcacctgatgaaaaaccgtgactaaacaaataattttttattttaaaattgcgttcaatttctggaagatttctaaaacgcttgtaagccttaattccttgtttcttcaaagcttctgtttgtgcattctcatcttctttaagatccattgcatcaataataacgttactaatcccgctatcaaagccatgcgttaataatttagtacgcatcttacgctctaattcacgttgtgaaatcttgccaacttgatggctcatcgacttaatcacgcgttggcccacttcgagccaatcttcttcatcaatttcatctaacttatcctgactaatttcaggatcaacgcctttttgcgtcaactttcgtaataaaattttagggccatcagagccaacacgcaaatcatttttgataaacagcttggcatattgacgatcatcaagatagcctaattcattcaattgactaacagcactattggctgcttcatcagagatttcgtgtttttttaaatattgcagcacctcaaagatggtccgaggctcgtaactcaaaaaatgagccgctaaatcactagccttagcatcagcatcaaattgcctaatcttttcaacctgctcatcatttaattctttacctttaagcagcacaaattctgccaacgttttctctccggcagaaaaagcatattttccatcaataaaaacattatagcgacctggccgtttttgtgcacttactttggttatgatcaacttgtttcacctcgcatatttttctacatccatgctagcaaattttgctaaagcttgctaagaactttttccaggtagtacaattaattgaacacaatttagtttttagtagaaagaattaacgatgaacagaaaatttacccataataaaccaaaacatgaaaaagacgtcatcatcactattaaacgtttaggaattaatggtgaaggaattggttactacaagaaaaagattatcttcattcctggtgccttgccagacgaagtagtagttgccaagattgttaaatcatatccacactacatccaaggcgaactggttagaattaaagaaaaaagtccagatcgcgtagacttccctgaaggtgttgatcccgagattggtggcttagaattagtgcacttgtcttacgacaaacaacttgaattcaagaagaacaatatgcttgaatcattacgcaagtaccatcctcgtaattacaataagtataaagttaaaaatactatcgctgctcctgacccatggcattatcgcaacaaggctcaatatcaaattgaaaaagatcatggtcaacttaagcttggactttttgctccaaattcccaccgcttgattgacttaccaaagatgccaactcaaagtgaagatacacaaaaaacggaacgtaaaatcaaggttttaattgaaaaattgcatgttcctgttgccaactatcgtcgtcatttacctggcattaagaccgtagttgtccgtcaatcagaagcaactaaggaaatccaggtaaccttgatttcgatcggccacaagattaagaacttaatccctcttgctaaagaaattatgaaacttgatcatgtagtttctgtctatcagaatgaaaccgaatggcagaatccacaagtttggggaaataaaaccgaaaagcttttgggcaagaatcaaatcaccgaagaaatcttaggtaaaaaattcgccttatcaccacgtgccttcttccaattgaacccagttcaaaccatcaatctttactcagaagcattgaaatacttagacctaacccccgatcaaaccttgattgatgcctatagtggtgttggtaccttaggtattttggcagctgaccgcgttaagcaagttgttggaatcgaaaccattccagaggcagtcaaagacgcacaacataatgtcgagcttaaccacatcaaaaacgctgattatattcaaggcagtgttgaaaaggttttgccagaattacaaaatagtggtgttgcaatcaatgctttaatcgtagacccaccaagaatgggcttagctaaaagcttgatcaaaaccctcttgcgggttaaacctgaaacttttgtctacatctcatgtaatccctcaaccttagctcaagacttagttttacttagcgaggcatatgatgttcgggtcatccaaaatgtagacatgttaccacaaaccccacgctgtgaggcaattgctaagttagtgctcagaaaagatagataaatccaacaacctagtcttgggctaggttgtttttgtatataaaaaagcggctactggacaatcctgtcccttagtagccgcaatttcaagtggatgaggtagctcatcaattgatagtcacgatttttagttgtttggtatgtatttaaacaatggcattatcgcaaccaatattaacattcacttgttcgggtctttacataaaatgtaacttttaataaattggagtttttgcgaacagccaatgataattaatcaaataatttttaattaagctatttatggctgacacctctacgtatagagaatctttcaagtttccaataataatacaattctggagataaaaacttacttatatttttttatagttgttaacttttatttctacctcttccacactattcattatatctagttgtgaaaccgtttacaagaactaacccatatatttttgcaaaaatctttctacttgttgtcgatattgctttggatacattggataagacaaagcatgccctgcaagtggcgcaagccaaatttgcttttgagcagctgttgccgcataattttgccagaccatcttagttggcacaaagtgatccttgccgccatgaataaataaaaatggtcgcgtatttttatttaactgagcaaccgcagaagcatcttttaaataaaagccatttttcactctattaattccactaaccaaatcaactattggaaaccgtggaaaagccttcatatgaaataaattttgagcttgatagttaatttcacctttcacggttgaataaccacaatcttcaataaaagctttcacttgtggtggcaaaagcataccgcttaccatcattgccgttgcaccacccatgctttgacccataattacaattttggcatttgtaccagtttgatcaattacttgatagatccaacgcaaaatatcatctttttcagcccagccatagccgatatacttaccttcgctgcgcccttgggcacgtgcgtctggaacgagaacattataaccaaaatcataaaacattttggcaaaaccagccatactatctccatcactcataaagccatgtaataaaattgcggttttttggcatgtttatcaaggtactgggcgaacaaagttatgccgctatcagtttttaaagtccatgttttcttagaaaaatctctaaaccaaaccttatcacgataaagtggatccttgcctgataattctttggagtcagcttttttattaaacggtgtcatcgccatcttgaaaaagtactcgcttgccgcaaacaagccagctccagcaattaatgcggaagacaataatagtttctttttcatcttttaacacttccaaattcaattatttcacttttcattttataattaaattgctgaaaatttacaatccttatgacttaattatactgaaaaatgcgcttaacagacttgcttcaattaatcgatgacctgaacctgaatactaaattttatctaaagcatgatgacaaactacttaagtggggaaaactcactattgccgaaggaaaatgtctgctgctacccgggcaaacagcaatgaccaaacaaaaattgattaaattagttggccgcatgcgtggtcgcggcatccccttgttaatggtcattgaccaaaaagaatattccattttcggcctacagattcgcgaagatactggacaagcaattttaatgtaaaaagtgtctgagaaaaaagtcgatttttaactaaatttaggccccggatttaaaattgaagtgcaacactaagtgttaaacaaaaaggccatgaagacctaaacttgaagtgacgaaaaatcaagaaaggaagatctttatgaccaattcaaattctagcatttctaagcactatcatcaattaaccagcgtacaacgtggacaaattcaagcaatgctggattccggcataacttcccgtactgttatcgctcaagaagtcggctgccataagtcgacaatcagtcgcgaaatcaaacgcggaagtgtcctgcaaagagacagcagctatttattgtatgagcactattacgctgatactgcacagatttattatgagaagcgtcgcaaaaactgctatcagcgcaatccattgaagcattatgctgtctttttgagaatgctctccagacgctttaaagctaaatttgatgccaccagcatcgatgagttcgttggtgaattcaaaaggactatgccaggctacccttgtcccagcacaccaactgtctatcgctatattgatcagggcttgctggacataagcaatattgatctgcctatgaagctcaaaagacgcaggaacaagcgtcatcacagccatggcggtcacgctttgcacaagaagcatcttggcaattccattgaacagcgtcctaaagagattgaagacagaaaagctccgctgcactgggaaggagatctggttaaaggcgtcagacgcaagaatcagcctgctttaatgactttgactgaaagaaccacacgctttgaagtagttatcaagattcctgactatcgggcaagcacatgccaaaggctgcttcaaaaggagattgacagacatcctgcctggtttaaatcaatcacgtttgacaatggctctgagtttgcggatatgaccaagatcaagggctgccagatttactttgctcacccatattctccatgggaaaggggcaccaatgagaactgcaatggtcttttgcgtcaattcttccctaagggcaagagcatgaaagacaagtcaaaagcttatgttcaacaggcaactgatgccattaaccacaaatatcgccgaatcctccaatatcacacagcagaagaactcttcaagcaatatatttcctcatagcctaactgttgcacttaatttgacaattcaggaactaaatttaggctttaactcaaaaaaaatcccattaaatcaaggtttgtatgtaccaagatttgatgggattttgaaatttctgtgttttttcccagacactttctattattaaactaaatcatacatttctggcattctgcaccattttgaattaaacattcgtctgcagtcaagttctcactaccagctaaaactttttctcttactctaacataataaattgagttgcatcgctttttaaaggcataaatataagccttatttaaatctcttgttgttgcattatcttcaacaaataaagttaacgaaattgattgatcaacatatttttgtgcagcagctgtaatatcaataatagcattaggtcctacttcatatgcgcccttttcgtaatactcataattgtctttattaatcttataagctggtacataaattcgacccaaatcagcctctttgcgtgtttcaacaggagctactactggctgcaaacttggtgtacatgaagataaataactaattgatccagtaggtgcaactgctaataagttagcattagctatacctgtctttttaattttagtaatcaattcttcccaatcttctttagttggaataactaatttatatttagctacaatttctttaatcttgtctgttttcggtgagacttcctcatcaataaattttttgaaataatcaccactagcatatgatgaatctttgaatcctttaaaagcaccatacttttcagctaatttatttgattctttaaatgcatggtatgcaattgtataaaagaaaattcctgtaaattcaactgcttctggtgaatcataataaatatgattagttgctaaaaagccatgtaaattcattgctcctagaccgattgctcgattagctttatttcccttttcaattgaaggagcacaatctaaatctgaagacctggcaacacgattaagcgcttgaacactatcagaaaccaaactacctaacttgtcagcgctattcattgctgctgcaatattaagtgatcctaaattacaacaaacatcgtagcccgtcttattaaaacttaagtcttcattataggtacttggcgtattaacctgagcaatttctgaacataaattagacatcacgatccgccccaatttcttttgtgggtttcttcgatttacagtatcttcatacataatataaggataccctgattcaaattgaacttcagcaatagtttggaagaattttctagcactgataaatgtctttttaatacgtggattattaaggagattttggtattctttagtaattgaaatatctgacattggtttaccatattcacgtttaatatcatatggtgaaaacaaagccatctttttattttctttggctagttcaaaagtaatatctggaatcactacgccaagtgataaagatttaattcttaccttttcgtcagcgttttctcgtttagtatctaaaaattgcataatctggggatgatgggcacttaaataaactgcaccggcaccttgtctttgccctaattgattggcataagaaaatgaatcttctagtaatttcattacaggaattatcccactagataaattcttcatttttttaataggtgcacctaattcacgcaaattagttaagcatagagcaacaccaccaccacgtttagataattgcagacttgtgcttattgctcgtgaaattgattccatattgtcttcaactctgagcaaataacatgaaatatattcaccgcgtctctttttacctgcattcaagaaagtcggagttgctggctggaaacgattactaataatatctttaactaaattcaaggccagttcttcattgccatcagctaaaaataaagcattcataacagcccgatcttcaaaacgttctaaaaattgtttattatcgtttgtttttaaggcatatgctttatagaatttagctgcacccataaagttcaaaaagctaaaattttgtgcataagctaatttgaaaatttctttaataaatttagctgtatataaatctagaacttttttatcatagtaatcattatcaactaaataagctaatttttcttctaaagaagcaaactttttcattcttggttcaatatgattttcaagatattgcttagtagcctccttgtcagctttaaaattataatttcctttttcatctttaaatttagcaagtgcatttaaagaaatatatgaatcattattaagattatcagtcattgtcttcacctgcatcagcaattattttattaacattatttacatcttcagttgttcccagtaactcaaatttatatagataaggaacatgtaatttcttagaaattacatcccctgccaaggcaaaagaattaccaaaattggtatttccactagcaataacaccaatacatttttgccgattagccaatttgttcaaaaagtggataacttgcttaggcacagcacctgtagtcccatggccaccagaataagttggcgtaattaaaatatattcttcagaaactgaaatttctttactgagtttaataggaatcctaatagaattacaatctaacttttctacaaaacgtgctgtattatttgaagtggaagaataatagacaactaatggctttttagaaatcccagtcatcatctgtagtctcctctcctgttcccattacatatgaagaaccattaccagaaaagaaatcatggttttcatcagcttgagctgataattgagcgaatacttctggagaaacataagtttcttctgcggtaaaaggagaatcatagcctaaattttgtaaaaatttacctgcattatacaaactgaaatgaattgcatcatcaaccaaatcaaaatcatcataaagctcgtgcaaatatttcttttccaaatcaattagtttatctaagaaatcaaaaacaaattttttcatttctgcttgtttagctggagctaatttctttacggccaattgatatttgtaaccgctataataattgtgaataaccttatctcttaagatcaatctaataatatcagcagtattaggcaatttacctcttgcagctaaataaaatggtaaataaaaaccaccataaagcaggaaccctggcataattgctgcggcaacctttgatttaagcggatcattgcctgtataatacggaattaccgctttagctcttgcttgtaaagcatcattattaactacccattcatgcgcttcttcaatttgttcactagtacataaagtagaaaaaatagttccatatgatcttgcatggacagcaaccataaaagcaaaatttgcatagatagcttgctctatatcagtttgcgaatttttaatttgggctacatcacccacacttgattgagttgtatctaataaagtcaatccagtgaaagtgcgagttataagctgttgccagtcatcagataattgattccaagaacttatatcattcgaaactgggattttttcaggtaaccaaaagttttgagtaactctgttccaaacctcaagatccttttcatctttaatgtcattccagttaatagctcgcatatttttgccgttgttattgtaagcaaattcaactggtgactgtgaatgatcataataacccatattttttgctcctatcattatttattgttttatctaatatatgtgtgagtacactatagcatagtctgctcaatgacacaacgaaactgtcaaatcttttgtgtaaatagatctttctcgtaaattgattttttaattatttatttaatcaaagtaggattctaaggtgtcctgaacctgaccaaagcctttatgaattcgattgaaataacggtcattgtagctcattgcctgaatgccaataaaagcatcaagcgactgttcagttggaaactctgccttaggcttagctttgcgcttgatcacattgttaaatgattcaatcatgttagtcgaataaattgaagctctgatctgcttgggatagttataaaagaccagcagatctggttctatgtctttcaagcttctgataacatggctgtaaaccttgccccatttggtatagaagtcatgcaggacagctgtggcttcttctttgtttgtctgttgatgcacctgtttgaattcgttcatgatcttttcacgatcgtcgacgcgtactttagcgcagatattgcgcatgacatgaaccaaacagcgttgaaaatgagctttaggataagtcctggccaaggctgttttcatgccaacaacaccatcagaaagaaaaagctcaacttgctttaagcctcgggatttcatgttttgaagcatatctgtccagacttcaatgttctcgctaggcgcaatgcagtagtcaatgacctccttgtgcccattaggcttgatgccaatggcaatatagactgcttcacgctcaaatgtttctcggcgcaaaggaaggtatgtcgcatccaaatagacgcagaaaaacttgtcgcttagcttgcgtttgtggtaagcctcaacctttggaatcatctgcttggaaatatttgatacctgagctggactgtaatggctgccatacatcttttcaattagatcggctatttccctggtggtcacgcccttggagtaaagcttgataatcatgctttccaagatatccgagtgctgcttgtagccaggcagcgtgtgctgatgaaattgaccgttgcgatcccggggcacttgcacttcaattgggccaaattgcgtatcaactttgcggaaataagcaccatttctagagttgccagtattccagccatttctggcatagggatcatagcccagaaaggcagtcaattcagcttctaacaagttattaacagcctgttgtagctctttgcgcaataaatcatttattttgtctggattgaatagagcttgagcaaaatctttggtaaaatcattcatgaaggagttcttctttctgtatgtgtttttttgttcaaaccaatcatacgagaaaggaactcctttttctaatgtttaaagaaataaatttaaggaatcattcatccttacacaaactattttacagtcttgacacaacatgtggattttttggttatttataatcaatatattgtggttaagtcgtttttgataatacaaaattattttcaaatttattttatcttcaaaaaataatgtaggtgttgtttttggcttttttgacaaaaaaatcgtgtctgggaaaaaactaattctcagacaggaaaaaagaacgatgatttcctaatggatttcatcgttctttttctatactttaagtgccttccttgatattattgaatcaccacaaaacaaaaagaaagaaggcaatcttaatgtatcaaaattataccataggtcaaacagctttaacactcaacttagacttcgctattcctcataatcatttggctaataccattagctggtttgtcgattcaattccagaagatgtcttattgggtaatactgctaaaaccggtcgtccagcttatcatccagcgatgatgcttaaaatcttgctttttgcttattccagaagagtattttcaggcagaaaaatcgaattaatgctggaagaaaacgtgccgatgatggctttggctgaacaccaacagatttcttaccatactatcaataactttagatccagcaagcacgccaatgagctggttaagaaaagcttcctctactttaccaatttgttagaagccgagggccttatcaatgaaggagcgatctttattgatggcactaaaatcgaagctgacgccaatcgctatacttttgtttggcgcaaggcagttgaaaaatttcatgacaagctcaaaggtcaagcggttgagctttatgatgaattgattgccaaagaagtcgtcaaagcaatggcaaaagagaaagtccagaccagtcaaggtttggcagagctagcacaagaaacggaagccgagattgaaaagctgaccgaagaaattgagcaagaacccaaagcaatccctggcgcttcgcctagaaaagcaagaagacgcggtcttaaaaagctgcttcataaactaagaaaagactatgttcctcgaatgaagaaatatgaagaggcgaaagaaatctttgcagggcgtaacagctattctaagacagatcatgacgcgactttcatgcatatgaaggaagatcacatgaagaacggccagctcaagccaggctacaatattcaagctgccaccactgatcaatatgtggttgactttgctttataccctaatccaactgatttcagaactttcgaaccatttttaaagcagatgacgacactagacaagtttgacaagattgtcgctgatgctggttatggcagcgaatataattattcaatgttagaagaagagtattcagacaagaagtactatattccttataccatgtacgaaaaggaaaagaccagaaagtatcgcaacgatccaactaagctggctaactggttctatgatgaaaaagatgattattaccttgatcaaaatggcgtcagattcaacttcaaatattatagtcaacgtaaagatcgatcgactggtcaggttcgtgattttaaggtctatgaagcagatgaatttcaactaacgccagaattagaacgcttagccaagactaagagcggacgccaacgtcaggttcgctataatcctaactggcaatacctaaaagaaaaagccaaagcagttctccaaagtcctgaaggcagacacatctacagcatgaggaaatatgatgtggagccgatttttggacatttgaagaacgtctttggcatgcgccgaactcatttaagaggcaaaaagaaggttgaaacagatataggaatagccttcatgatggtgaatttaagcaaatattggaacagaagatggtcaaaagaccaattttctttgttcaaaaataaaaatagacagaaaaagacggtcaagcaactcaaattaagagttggattgatcgtctttcagtatctaagggttagtttttttccagacactttcttattcttttacgcggtattgacgaatatgatccttagtaccagcaaaataccaagtacctacttcatcgtcgctagttaattctaaaccaccctcaggatctaacaaagccgtattgaagacgtcttcatattgcttaactgtcagcttcttccgccgattaagcattgcttgatcagctgtaggatcaatttgtttttcatatccttcaaccaacttgccactataaaactcagccattgcacctgaaccatatgaaaacaggccaattaatgagccagcgggtaattcaccattctctagcaaactaagtaaactcatataaagtgaagcggtgtagatattacctactcggcttgataattgtttagcagccgcaaaactacgctccaacttgatcattgttgcttgatcttgcccctcaatagcaatattgttagccttcatccccatcttagtaaatggcaaatggtaagtaatcgcatcaaagtcgcttgttttcaatcctttttgcttcttataatcagtaaaggtcttcttgaagaaatccaagtaaacttgagtcgaatacttgccgtcaactaaagcggtgcgagaataatttggtctccagaagtcgttaatatcttcgctgtaagctgaatgaccattatttagggctaaaatgcttgggtcagctttgatgagcattgccacgctaccggctccttgtgttacctcaccagcagtattaacaccatagcgagcaatatcactaccgatgacaattgcggtttgttcaggatgtacccgaacaaaatcacgtgccatcattaaggctgccgttaaaccaaagcaagcttcctttacttcaaaagttcttacttctggcttcaactttaaggctgtttttacaaataaagaagctgactttgattgatcaatactactttcagtcccaaaaattaatagaccaactttgttcttatcaatcttgtcaataaactttaaagtcgcattaattcccattgaaactgcatcttgcgtaatatccgcaacactcatctctctttgaccaatgccaactaaaaacttatttggatcttgctttcttgcgttcgccaaatcgaccatatcaacgtacttgtctggcgtaaaaagtccaatttgatcaatacctacttgcattatttttcctttcttatttttgctaaaagctccttagcatgactttcagaataatttttttcactaatcatcgcagctagtagctgcttgcgctcatgttcgtcatcggttaattcagtgactacgtttctagcctgcaatttcatatgccctgcttgaatgccgacagtagaaattgccagtaaagcggctaaattgtttgctagagcaacactaacaatgatctcggctaatgttttactcgtgattttttgccccaaaatagcaaagctttgccggacatcatgccgagctttaattgaaccgccaactactccaatcgccattggcaaagtcaattcgccaactaaataactaccctgcatcgtccactttgataaactgcgatattggccatcatgattggctaaaactgcagtggctgcttcaattgcccgataatcattgcctgtcgcaatcaatacggcgtcggcaccattcataattcctttattattggtaactgcgcgataaggatcgtcaattccaatttttcctaatagagcaacacgttgtgcaacttgcatcccaccaatcgtttgtggatcaatcttcactttagccgtggccaattggctaggataatttgataaaatcgcaaataatttttcatcaacaccagcataattttctaatttagccgctaaaaattccaaaatcgagttggttttatttgcgcccattgcttcggctggatctaccagtactttcaaataaagtaaattttccttttgaacagctgtgatttttttaacgccaccgccatgacgcactaggctagtaaatttttgattaaccaactcaaccaacttaggaaattctttttctaattcaattaatgaaaaagaattgttgaccttcaaaacgatttgaccataaatcccttgtcggtcgctgctagctgtcacaccaccatttctagcaaagatactagctccatgattggcggcagcaactactgaaggttcttcaacagccattggcacccagtatttttgtccattgactattaagttttgtactacacctaaaggcaaacgcagctgccctacaacattttcactcaattcatctagacgtctcaaaaccgtatcatcgatttgccctaatgcaataccttcgtcctgtaataacttacgtctagcttcaggctctaattgataaaatttcattctgcattctcgatttcataagcaatcgcctgaccgccaccgatacacaaagtaaccagggcacgtctgccttttctcttctttaatccactaattgcactagcaactaagcgtgtacccgttgcacctaaaggatgacctaacgcgattgcgccacccataatattcaatttatcagttggaatttgtaagtcgcgagctaccgctacactttgggctgcaaaggcttcatttaattcgataatatcatagtcatcaaaattacgccccgtcttcttaagcagttttttaactgcataatatggagtataacccatcagtgcaggatcaaagccagcttccgcaaattcacctaacttggcaatttgcgttaagcctaactctttcattttctccttagttgccagaactaacatacttgcaccatcagtcaaaggagacgagtttccggcagtcacttcaccatccgccttaaaaacaggctttaagttactcaatgcctcaagcgttgtatccggacgaattggttcatcatgatctaaactttgaccatcaatctccacatccaggatctcattatcaaaaaatccggatttaactgctgcagctgcctttttatgcgactgcaatgcaaattcatccatatcctgacgactaacatgatatttttctgctacgttttcggcagtaattcccatatgcttgccagaaaaagcatccatcaaaccatcgttaagcatagtacttactaggtgatctgctggatcatttttgttttcttttttaacaaaataaggcgcattagtcatgctctcactaccgccgacagctactagatccaaatcgcctagttccatctgtccttgagctagacgtaaagctttcagacttgagccgcagacttcattaattgtaacggctgcagaagcttcactcatccctgaatgtaaggcaacttggcgagccatattctcacctaagccggtatccaaaacattccccataaacagtgcttgaacatcagctggcttaatattgcccgccttcattgttcctttcaaggccattacacccaaatcaattgcagaagcatccttaaaaaatcctcggtacttgccaaaaggtgttcttttagctgcaacaatataaatgtccttcatatattttctctccattctccataatgtgtattttttaacaaatatgataatagcaaaaaaatattaagaaaaacataaaaagactacgccgcagcgtagtctccctaataattaagcttattttttattttgcttaccttcggcttcaaacttcttgctcaattgcatgatatatgcccgcaattgttccttaatttctgggtgcttcaaaccatattcaattgaagtttcaaggtagccttctttgttaccaacatcatgacgttcgcctttaaaggcatgagcaaagacacgttgagtcttgttcattgtatcaatcgcatcagtcaattgaatttcaccgccacgacctggtttttggttagccaaaatatcaaaaatttcaggtgttaataagtaacgaccaataatggcataatcactaggtgctttatcaatatcaggcttttcaacgaatgacttaacattgatcagtcctggcatgatctcattttccggttcgatgacaccatacttagaaacttcttcatgtggcacaggcataactgcaattgtagaagcatgcgtcttgttatagcgatcgatcaattgcttggtcaatggcaccttatcttccattaagtcgtcgcccaacataactacaaatggttcatccccaacaaaactgcgagcacggaagatggcgtctcctaaacctgctggatgcggttgacgagtgtaatacaagttaacgcctaaatcagtaattccttcggttaggcgaagcaattcttttttacccttttcttccaaatcttgttctagttctggattagaatcaaagtgatcttcaattgggcgtttgttcttgccaattacaattaaaatatcttcgattcctgactttttagcctcttcaacgataaactgaattgttggtttatcaacgataggtaacatttccttaggtaaagccttagttgcaggtaaaaatctagtacccaaaccagctgatgggataacggcttttcttactttcataaaagcacactttctatttcaattttataagttcatcataacaaaatatgcatttttcagctacttagtttttcgtcttttcttttgaatataactggcaatacgaccagcagaatattcaacttgtccaacacggtttcgcacaatagcagcgttaacaccaacgccaaataaaaataatactgctgcaatattcaaccagagcataaagatgataaacgtaccaacaatgccataattctcccaagtaatcgggaaatggtgtaaatagaaactaaaaagaaatgatagggctaaccagcctacaacagttacaaaaactcctggccaaattactctctttttgagttttatattaggcaaaacatagttcaaataccataatgctagcatcataaccaatattaatactggatagcgataactaaagatcttgctaatttcattaagtggtagctgaaaaatcggtcctaaaaagttgagtacttgttgcccaaaaaccaaggtcaatgtagcaattgtaaatactagaatcatcaatcctgtaaaaataaaagtaatagttctagtccaaagaaaattaagcattgataattttaattcaacttgatgaaccccataaagtctattttctccaagacgaattgcattaaccatatttgataatgaccaaactgcaaacacaataccaaaagaaatatagcctgttgatgtcgttttcaataaagaatttataattggcataatgaattttgacacttggtctggaaaaaccaagttcaaatattcagcaataggcgcagtatcaatgtgaaacaacggtaacacgttaccaatgataataataatcggaaaaatagaaaacaaaatgtagtaggcaataataattgaactagcaaatatctctccttgagataaggtggttcgtaatgtagaaataaattgcccaatttttaaaccaaaatggtttttaccatttttcatccattatcctaatcatccatctcatcaaagtgagggatgtacttttctaagccatcgtaaggatgctgcagggtcaagatcttaggaccatcttttgtaattgcaaaggtgtgttcaaattgagcagcattagaaccatctggagttgcgtagtaaacccaatcatcgttaggatcatcaacagtacgttggtcgatgtgccagtcgccaccagcttctaccataggttcacaagtaatagtcatgccttcacgcaagcgaagaccatgacctgccttgccccagtgaggaacttctggatcttcatgaattgatggttgaataccgtggccaattaattcacgtacatcaccgtaatgattttcatcttcaacataatgttggatagcagcaccgatatcaccaattctgttacctaaaacagcttggtcaattccgagatacattgcttttttggttacttcaattaatttcttatcagcttcggaaatttcgccaactggataagtagtacatgaatctgattcataaccgttcaaattgcaagttacatcaaccttaacgatatcgccttcctttaagatgcgatcttttcttggagtttggtgggcaatttcatcgttaaccgaaatacaagtaccatacttataaccttcaaaaccttgttctgaaaggcggccgccacgacttgatacgaagtcttgacaaaactcttcaatttcccaggtagaaatgcctggcttaatcacatcacgtaagccttcaaacatagttgcaagaagatgtcctgaagcttgcatgcctttaagttcacgaattgatttaattgtaatcaaaataatttctcctttataaatttttatttagtttcagatatttctattataccgttttccaaaatacttttaaaaggtcgggtttttgtagaatcaaaacaaaactctagaaatacctgaaatatttttaaagtttgctaaaactaaacgtttttgcaatagtttcatgtataataaggtgtcgtataatgcagtgaaaggtatgaaaaatcatgaaagcaagaattgtttatgccagcatgactggtaacgatgaagacatggctgatattttagaagaagatcttcaagattatggctttgacgttgaaacaagtgatgtcggcttcactgatgccaatgactacttagatagtgatctttgcatttttatcacctacacctatggtgaaggcgtaatgactgatgaattggcagacttttatggggagttaaaagacttagatctaacaggcaaacattttgctgtgatgggttctggcgataagacctacggtgaacacttttgtgaaaatgtttttgactatgaaaaagcattcaaggattgcggcgcaactgaaattactaaacccgtaacaattgaaaatgcgccagatgatgatgcagtcgctgcaatcgatcaagctgcaaaggaaatggccgataagttaaatggctaataacaaaaaagacgtcacagctgttgatcaggcacaaatacgccgtctaggtcaaaaattaatcaagcgacaccgtaatctttgggtttacatggttttcggctttgtcgctgcattaatcaataccttagtcttcatggtcttacactcatggtggcataatgtgatggtaatttctaacaccatcgccttcatcgtctccaacctggcatctttctggtttaaccaaaaggctgtttttatcaataatgtcgatcatgaacacagcacgtggcataaactaatcgtctttttcacttatcgcgtcatcagtttaatccctgatacattaattatgttagtcggcttatcctggctgcatttaaacgcattactagtcaaaattatcgaccaaattttagtcggtgtattcaattacttaactactagatcagtctttcaaaagcaagaacatactatgattgaacgtgcaaaaatgcgcattcaagaacaaaaaaataaaagagacagctaatatgaaaatcaatgtcattaagttaagacattgacaaattgaatctaatctctgtagaaccgaatcattatgatttggttctttttttgcataaaataaaggcgaaaagaacctaccttttcgccctctgattaaattattaaaccttcaaaattattgccagaaagctggtgttaattatgaaagcccttcacagaaatattttagatcgtcttgatcaaattatcaatgatactggaaagcatattcatgattttatcgatgatcctcatgccttcactaggaagcggtttttagatgcagctacagtcattaaaactactattaatatgcaaggaaaagatttgaccagtgagttgtttagagcttttggccaaaaagctattaaaaataacgataaagtagtcagtacttccgcttatgtccaacgcaaaggtcagctttcacccgcatgttttaagcatattctaactgtatttaatcagaatttatttaatatccagttatttgatcataaatatcgtatatttgccattgatgggtctgattttaatcaaatctggaatcctaaatcagagaatatcgttggaaatctcaatcataaaggaaagccatattgccaaattcatgttaatgcactctatgacctgttaaataatacttatcaagactgcatctttcagcctaagtcaaagatggatgaacgtaaagccgccattcaaatgcttaaaaagctaaattgcggaccatatatagttactatggatcgaggttataccggctttaacatgattgaaaattgtaatcgcctgcctaactgttattatgtcatacgtactaaaacgggatatggcgcatttaaggaagtagctgagttgcctaatcaagagtgtgataaggatatagcttgctgggtgactacctctaattattattatgaaacccataaggctacagaaaacgttcatttggttaaccatcattaccgtcaatatataaaatatcggtctaaaaataccaaagatggcagctgggactttggagagttatgtacaataaaatttcgtgcctgtaaatttagaattaatgatcctaaatcaggcaaagaagaatgggaagttgttctaactaatctaaatagagccgattatcccttaaaaaggatcaaagagatctaccatttgcgctggggcattgaaacttcattcaaaaagttgaaatatgctttaggtagcgtacagtttcattccaagcaggatagatttattgaaatggagatctatgcccacatgattatgtttaacgcagtcagtcaaattgatgctcaagcatatgtaccacaaaaaaactgcaagtatcaatatgcgatcaatttcaaacagtcatgttttgtcatccaggctatgtatataatttcttcttcaactgaaatctttaaaaagattcttattcaaattagtcattacacaattccgatcagaccaggacgaaaagacaaaagaaatctcaaacccaaatcagctgtatattatttatatcgtgtagcctaatttctaaacaaaatttgggtttatttggcatgaaaaaagatcattcaaatgcgataaatcacaaatgaatgatcttaaaagtccaagtcgataatttgtcaatgtcttaacttaatgacattgatatgaaaattagctctttttttatttactcaaaatcttttggtttactttcactatcttgattaaagtaataataaatatcatccataattcgatcagctgcatgtccatctccatatggatttttggcattcgccatccgatcatattcgtttttgttttctaacaaagctagcatttcttcacgcaccttgtcgacttcagttccaactaacttcaaggtaccggcctttacgccttcaggacgttccgtcgtatcacgtaaaaccaaaactggtttacctaaactaggagcttcttcttgtacgccacctgaatcagtcatgataaagtatgaacgtttagctaagttatggaaatctaccacatcaagcggctcaatcaaatgaatccttggatcaccaccaagcacttcattagccactttttgtactcgtggagataagtgaaccggataaataatttctacatcaggatgcgaatcaattacttgccgcattactttaaatactcggcgcattggctcaccttgattttctcgacggtgcatagtaaccaaaatcaccttattaccaggagtaattgcgtctattacctcatgatgataatcttgttgtacagtctgtgctaaagcatcgattgccgtatttccagtaacgaaaataaaatcagaatggtgattttccttcagtaaattagccttactcaattcggtcggtgcaaaatataaatcggctaaatcatccgtcatctgccgattcatttcttcaggatatggtgaatacttattccaagttctcagacctgcctccacatgtcccaatgtagtttgctgataaaaagtagctaaagaagccgcaaaactagtcgtcgtatcgccgtgaaccaagacaatatctggtttctcttctttgatcaccttagataaatcaatcatcactttagaagtaatttcttctagagtttgattttggtgcataatattaaagtcataatctggtttaattttaaaaatatctagcacttggtccaacatttcgcggtgttgtgcgctaacgaccgttacttcttcaaaacgatcatctttttttagtttcaaaacaagtggtgccatcttgattgcctctggacgcgttccaaaaacagtcattaccttaattttcctcattaaaaaattcctccgcttaactattttactatacctgattttagactatcttgcacccgctttctgtgttttaatggaagtattaaattgaaagttggtcgatgcatgaattcatcattactattattaattacaactggtttaattattttgattggaactttttgccttgtttttggtatggacaaaaacagacccgctaaaactagaaaatatttactttatactgcactaatctgtgttttcctagtttggggcttaattactgcaattatgcttcaacccttaggataataaagataccttttggataaccaaagcatgtaaaaagcctgcaagaccaatacttgcaggcttatttctatgaccccggtgagatccgaactcacctctacggtttaggagaccattgttctatccagatgaactacggggtcaaacctaagattaactttaccaaaaaaagtggtaatagttaacctttttttagaattgtggattaaaaaatgttttcggatggttggtatcagcaatcttatcagctgctttaacaaaaggcatccaaattagcaaagcaacaatcatatttaaaatgcttaaaacaattgcacgccaatcataattgcaagccagaaatgggccaataactggtggcatgatgctaggtactgccacttgaactggattaaccaatcccataatgctaacccaataagaaaaggcaacattaactagtggcgctaatacaaatggaattagatacactggatttagcactacaggcaggcccaagagaattggttcgccaatgttaaaaattcctggagctagtgagattttggcaattgtgcgataatcactgcgtttagaaaacattaaaatcgccacaattagcattaaggttccaccagcaccgccaaaccaggcaaagacatcaaatgagccacgtacccatacatacggtggaatatttccattactaatcgctgtgatgttatcattttgagcagtcatccaaattgaatccaaaattggtgatagaacccctataccattaattccaaaaaaccaaaataactgcactaataaagtaatgacaattaccgtaccaaagccttgtccccactttactaatggagtttgaattgtggtaagcaaccaatttccaaaatatttaccggtaagaatttggaacaaataattaattccgcctacaccaaatattgcaatcattgcaggtaataaagaatcaaaagcagcttgttcagcatggggcaagttcgatgtcacatgcaaaataatccttgctttatagcaagcataataaataaaaaagcctaatgagccaaacaaaatagcagtaaagaggccagtagttgagaactgactaatgtcaaatgcattatgaagtgtaacattatcaccatgaaatttaatcttagctatattggcaatgcttagtgcaaaagaagataatgccacaattgaagcagcaagtctatttccttcaaaagcttttgctagttgatagcctaaagccaatgctaagaaaaaggcaaataatgaaaatgttcctcgccaaactaaattactgattgctaccaatggctgcatcgcaaaagcaaaggcataccagcctaaatgatcatgagctgcttcaattaagctcttaattaaaactgctaatgatcctgccattgtaattggcattaatgagacaaatgcatcccgtaaagcaactagccatcttatctgaccccatctactagctagcggcaaaacatagtcctctagccatctaactaaacgaatcatttctttcctttcaagtaatgtggatgatatcccttgttcttattacgtttcttgcgttttttagttttatttttcttagtcgaagtcttaatgggctgctctttagcctgcttcttttccttcttgagtttaggcttttcagttgttaaatgatagcctgcaaagtagacacgctctatttgtaattgatctgccaataatttcttcaaatcacgaaaatcgtgatcatcgcctaaagtaaccacataaccttcagcgttcattcgacctgttcttcctgcccggtgcatgtaagtattagtctcgctcggaatatcaaaattaatcacataggtaaggcctggaatgtccaacccacgcgcagccaaatccgttgccagcagcaatttcgtcttaccagtagctaggtcatttaaggctttttcacggcgttctttaccaaattcattagctaataattcgaacttagtcttagtatgcccaaaaataccagcaaagcgcatcatcgttttatttgaatcaaagaacaaaattcccttaaagtgatccaacttagtcattcgctgcaaaaattcaatcttgtgttgattgtctacttgcaaaaaataatgtttagtcgctgaagcttgttcatttctgacatctactaacaagaaatgacggttaaaaacttgctccgcatcccgtgtaatctcagaatctgttgctccaaataataagatttgactgtctggacccagattttgccctaatgctgataacaattccattttagtaaattctaaaatatcatcggcttcatcaataatcaaagtcttgatctggtttactttaattcgaccacttgagaagaagtcaaaaaaacggcctggtgtagctacgaccacttcaggatgctttttcttcagattgtcttcttgtctctttctattgccagcaccaaccaagctgacgccttttaatcctaaagcgtggatgtaaggattaattgcatgacgaatttgtacagctaattcagtcgttggcgcaataattaccacgctgttagcattacctggctgtgctttttccaaactaggaagtgcataagccaatgtcttacccgtacctgtcttagccaatccaaccaggctcgcaccattgcgaatggcatcatagctttctttttgaattaaagttggctggtccttgtgttctctaattaaaacttgtttgattttttcttgatacattattactgtgttaattgcccatacttttgcttatattgaccaacggtcccgttatacgcgtacatcgttacctggctttctaagcctgaaacattccttacgcgtccgttagtagtgtagcaccaaaatgaatactttaatttattcggtgccttactatctgatgacataaataacgtttgcggattaaagtaatgttgatatttatgatcaactttcaccatgactcttttgccagctgcttgcaataaagccgcaaactgccccattgaccgcaaatatctcgctgaacgagtagtcactgccggtacaattagaattggcagcgagcccgtattttgtcctacttgcttaaaaaagtagcggtaatgctgcatcggagtcgattcattgctataggaaatctcactaccaaatgccaagttcgttcctaaaatttggtcacgataagacagatagttttcatcaaaatatgatctgccttgggttgctttcaaatatataaaggaaacgccattagattgcaatttatgtaaatcaacatagtcaatatcttgatttaactcaatcccaatcgcacttgaattagcatctggcggtaaagttgtttgccgcttaaaattgaaaaagccaatcaaaagaaatgcaatcgccagaattaataaagtcaaaatcgctggcaaagtatacctatgctgaaatcttttcatcggctaaattcctcccttaattattttaaccgaaaagcctatcaatacaaacatttccagtcgatgtgctaaaatttaaataatgtaaacgaaaggcaacaaataaatatgaaacgacaaatctcattcggccaagcattggctaccgtagtcggttctgtcatcggagctggcgtatttttcaagatcggaacaattactgcacaaactggcagcacttcaatgaccctgtttgtatggattttagctgggatcatttcaattgcatcaggtttgaccatttcagaaattgccgccagcttaaaaattaatggtgccattaagtatcttgattacacttacggccgcgtgtggggttttctttttggctgggcacaaatgattgtttattttccagctcaaattggtgccctaagctcaatttttggcgttcagtttgtctccttatttggaattaaggcgaggtattctaacctaatagctatcttgctagtgctttttctcttaggaattaatctaatcggaactaaattttctagcaaaatgcagtcggtcatcactatcctaaaaatcattccaattgctttaattattatttggggattatttaatcctgccaaaatacctgcaccaattattccgttaacagtcggcactggacattcatttccaaccgccattagtcaagggttactttctgcgttattcgccttcgaaggctggattgtagtgactaatttggctaacgaagtcaaaaatccagaaaaagacctttcacgggcaattattttaggtctttcagcaattacattgatttatgttttaatcaattatactttcatgaccgttttacctattgatcaattaactaataacaataatgccgcgtttcaagcttcaatgaaattgtttggtcagtttggtggaaaactagtcactgtgggaattttaatttctgtttacggtgcggttaacgcattcatgctgacagggatgcgtacgccttatatcttggctcaagacaatttattgccattctccaataaaattggcaaggctaatatccataccggtgttccagtagttggcgcgtttattgttgatgctattgcaattgtcatgattctactaggtaattttactgttttaactgacatgctagtcttcgttatgtggactttcaacacaatgttgtcagttgccgtaataattttgagaaagcgtgagccagaattaaaacgtccatttaaggttccatggtatccgatcattccaattatttccgtgatcggtggtatcttcatcgttgtctcaacaattatcaatcaatttgttctttcaattattggtattggtttaacattgttaggactgccaacttactattacatgcaaaagaaaaataattaacgaaaaaagccgccgattttgggcgactttttatttgagtaaatatatttattaatgttgtgaagcaccgctagttgcatcattttcttgatgatcttcataggcagtattggcagcaattcgaccaaaagtgaaaatatctgccaaggagttaccacccaaacgattaccagcatgaatgccaccagcattctcaccagcagaatatagaccatcaataatttgaccatctttattcaaaacatgtgccttagtatcaattactaagccgcccatagtgtggtgaatagcaggctttctcggagtagcatagaatggtgcaacttcacatttgaggcctaatacattcttatggaagtctggatcctcgccacgatcaacgtaagaattataatcctggatagttttaaccaaaactgctggattcattccaatttgttttgccaaatcttcaagcgtatcagctctaaacaaggttccagccttaacttgcgcatcaagtgactcttgggttgtattgtaagcagtgtccttaatcttatcgtccgcaatttgataaatcaaaccaccattttcgataactgccttagccaaaacatcccgttccgcaaattcattaacaaacctcttaccctttttgttaaccataatatagttagcaggcggagttacaacaccagtgaaaagctcaccggtctttggatcagctactggcattaattggataaagcccataccgaataagtctgcaccagcttcaagacctaagttaatcccatcgccagtaattgcaggtgaattagttgttgtactatcgtctgcaatgtttggccaataggtattgtatttttgaaccatcttagtattggcaccaaagccacctgccgttaaaattactgccttagcatgcacagtcaaagtactactgtcagcgcgtgttgcaattacaccgcgtactttgccatcttcaataattagtttttcaacacgagtttcaagatatggatcgacaccatgctctcttatccaatcacccaaaacgtgaataaaggcataacctaatggctctactggcttatgacctctgcgccacaaaccaccaactggttctgtaacttgagaattatcaaacttaacacccaaatcttggagccatttaacagaatttaaagcattagttaccaattcatgtaccaaagcatatttaccatgaatttcgttaccttttaaatcagtccttttaccacctaaataagtttgaatttcatggagtaaagtcgaatcaaataaataatctgtaccagaatcaatatattctttgatttgtctttgtaatctttcaaaatcaaagcggtattctaaatcaatttgttcaattggcgtattagccaagtcttctaaagtctgtttttcaccaggaagagccttaaatttactttgccattctggttcagccgcattcattggaccaccagcacggctagtattaccaccgatctgtggatacttttcgagaacagccaccctttcaccatgttgaattgagcgaactgcagctgctagaccagcgccacctgcaccaactacagctacatcaacagtaatttcttcatcttctacctttgtagcagcgggcttttcacggtttttccattcggttgaatcgccgcctgcttcatcaattgcttcggctacgccatcaatcacaccatgactggaaatagtcgcgccactgaccgcatcaacgtttaaagtttgattttccacaattgttttaggcaaacgtctaaatacttcatcggctactcccttagtttcacctgatgaatctactttgattgaagtaactttatcgccatcaatgtcaacttccattggcattgattcggaaccatgacctttagcttttacttgatattttcctgacttcattgcttacacctctaataagtttaattttatccacaagttaatattagtgcgtcatctgttgatgtatcaaatatcaatttcactatactttcataataaaattgttatgagataactatgtttcgttctccaaataaaaaaagcttaatgcaaatagttatccacattaaactttttaattgcatgatttaattaataaactgaaacttgaaagctaagattaacgctccttccccgcgcctcttggctttttcttatcaaaaataaaaacgcaggatctctctgcgttatactttaagtgtcaacctgaaaagtaaaggagatcctacgcaatgaacagtatagaacaaatcgacacagaaaacgataccaaatccttaatttcttcatttattaatctaattggtctagctaagttgactaaacaagtcaactttaagcgtaaatctaccgtttcattaaccatgattatctcttggctgatgtctgtacattttgctcggctttccttattcagagctaagagtgacaagcgtttttccgttagaactgctcgcaatgtacttaacgatggaagaatcaactggcaaaaactattatgcttgattgcagctcggctcattggctgcttcaaacatccgtaaaaagaaacattatctttattcaagcatagttgaggctcaatatcatggacatatctttttattaaagctcgtttttgtctccaagcgtggaaacaagaacaagtatttagttttagctactactcagacaaagcttagacctaaagaaatcatccaactttatggtcgtagatggcaaattgaaacatattttaagacgtataagcaatatcttgctttagataaatctcaagttcaaagctatgatggacaatgtggctatatcgcagttacagcaataacttatgatctattggcctggcaggaaagacaaaatacagatgataagacaatcggagatttattctatctaatgaacgaatccttacctgatattagattcgtagatgcattggtctacttaatttcagaattaaaagagcttaaacagaatagttttgaaaagatagatgaagtaatcaatgactttattaaccaactgccacgattcatacaaattgcactgaaacagatcatataaaaactaattacgtctagaaaagctcaatagtgacaggacttgagcttgattttggtgctttcaagtttcagtatttaaattaagcttcagaggcgcctgatacagcatctgcttcttgttcatttgaaacagtaaaataattataattggtattatccgcagcagtcgtacctgcaacaaaaccagaagcatagctccaagaattcatcatacttggcattgaatcatgaccattagcaccaccaacaatttctcctgcagcatagaagttacttacgggattcatatcattgtcaagaagctgcatttgatcagtagtttcatatccacccaaagttgtgcagaacagaattttttgttcaattacataatatgtatcgccttcgaactcatgcataaacttcttgtctctaccaaactcaggatcataatctgctttaacatcttcagtatagttatccacagtttccttcagcgtttgataatcaatacctgctttttctgccacggtcttcaagtcgcctttgaccagaactggactcttctcgccaaccaaatcaaagaatgattgaacctcttccttggtaaagccatacttaagcattaattcatagaaacggtcccaggttctttgatccatgacaatgtaagctaccttacccttttgttcagcaatcgcatccctaaaatgcgtataaggtgcagattcgttaactattctcttaccatcagtattaacaaaaatagcccccatatcggtcgcttctttagttgaataagttgttagcttagcaataccaggttcaacttccaatccatgtggatataccttataccagtctaagttacgagtaaccaaattcatatttttggcaaaatcaagataatcaccagttaaagtcattggaccataatatggaatatcagtcttatgagcctgataatcacgtgcaccccaaccaccagcagctaaaacaagtgacttgaaattgacattaattgtctggtgcttgccttcagcggttaaagataccagtttgccagccttatctttattcaacttttcaacacgggcatctaagataatttgtccgccctttttttcaaatgcctcagccaccttagtcactagttcatatgagctttcactaggcatttcaatttgacgatatacactatgttcaactgtttgggtttccgctttttgataagtcaaatttgcaaattcagtaataaagtctactgccttcccaatattgttagctaatagctttgacaacattggataattagtaccgcggcattcacgagtaatatcttgaactagtctatttggcgaatccttctttgccgtttcaccaaataattctgcagaaactttagagccagttcctacaacatttgagccatttaaaatagttgctccacctaaatagccatttttttcaagtacaactacttttttacccatcgaaagagcacgacttgccgccattaacccggccataccggagccaattacagccacatcaacatttagttgcctttcttcatgtacgacttctggcttttttccgtcaagagcaatgttattttcggctaatgcttttttaccagaatctagcattgcttgagtcatcaatgatgccccagaaacagcgtccacgtcaaaactttgattatcaataatatttttctttaatttaccaaaagtttgattaaaaattgcaggagtttccgaattcttggttactttgacatcactaattttattgttttctaagtcaatctcaaaatcaatttgaccattgcgaccatctgcttgagctttaatagtttgtttggtcataaaaactactcctttacttgttctttttactaaaccgcttatattataaccacaatattaaatctaaaaaataaatttaatttgatattttaatagaatttttttacctgaattgtcaaattaagtgcaacagttaggttatgaagagatatattgcttgaagagttcctctgctgtgtgatattggaggattcggcgatatttgtggttaatggcatcagttgcctgttgaacataagcttttgacttgtctttcatgctcttgcccttagggaagaattgacgcaaaagaccattgcagttctcattggtgcccctttcccatggagaatatgggtgagcaaagtaaatctggcagcccttgatcttggtcatatccgcaaactcagagccattgtcaaacgtgattgatttaaaccaggcaggatgtctgtcaatctccttttgaagcagcctttggcatgtgcttgcccgatagtcaggaatcttgataactacttcaaagcgtgtggttctttcagtcaaagtcattaaagcaggctgattcttgcgtctgacgcctttaaccagatctccttcccagtgcagcggagcttttctgtcttcaacctccttaggacgctgttcaatggaattgccaagatgcttcttgtgcaaagcgtgaccgccatggctgtgatgacgcttgttcctgcgtcttttgagcttcataggcagatcaatattgcttatgtccagcaagccctgatcaatatagcgatagacggttggtgtgctgggacaagggtagcctggcatagtccttttgaattcaccaacgaactcatcgatgctggtggcatcaaatttagctttaaagcgtctggagagcattctcaaaaagacagcataatgcttcaatggattgcgctgatagcagtttttgcgacgcttctcataataaatctgtgcagtatcagcgtaatagtgctcatacaataaatagctgctgtctctttgcaggacgcttccgcgtttgatttcgcgactgattgtcgacttatggcagccaacttcttgagcgataacagtacgggaagttatgccggaatccagcattgcttgaatttgtccacgttgtacgctggttaattgatgatagtgcttagaaatgctagaatttgaattggtcatgaagatcttcctttcttgatttttcgtcacttcaagtttaggtcttcatggcctttttgtttaacacttagtgttgcacttcaattttaaatccgggtagaatttttttatcaaaagcagtaaataaaagcgagtgatcattctcactcgcttgattctttatctaattttcatccttatttattagcgtaatgttgaataacttctggcttcaataccccaacataaggaaggttacgatacatatttaaaaagtccaaaccataacccactacgaattcattgccaacctttgaaccataatattctaattcaacatcggtagttcttctggcttccttatttagcattgcacaacacttaacgctcttagcgccacgtgccataatgtgttctttcatgaatttcaaagttaaacccgtatcaacgatatcttcgacaattaaaacatcgcgatccttcacgtcagttaccaaatctgatactatcttgaccttaccagttgactcaaagccatcaccataactagaaacatcgagaaaatccagttgatgtgctacgtccatttgtcgagttaagtcagtcaagaagtaaattgcacccttcaaagccccaacaactaccggctttttaccagcatagtcctcagttaattgcttacctaaacggacgcacatctcatgaatgtcatcttctgtgaataatttgtgatctataatttggtcaatattgtcgccttttgccatttaatctacccttcaattcaatttacatatattattcctaataaaaagaattataacatctttaaacaaaaaaagcgtcattttcaacgcttcctctgaataatttctaattttcatcctttgattgatcgtctttttgatctttatccttaatcggttcaacgataaaccagcgcataaagccttgttcgatactgtctaaggtaaacttatatccttcaagttcaattgattcaccctttttcaagttaggataatgttccatcatgtaaccaccaatggtaataatatcgctatcttgaaaggccttcagatctgtatggaagaaacgctcaaagtcatataaagtcgtcttacctgaaacatgaacttgaccatccttgtccttgataatgtaatcatctgaaacatcatcaatttcatccttaacagaaccgaaaagctcttcataaatatccttatcagtaacgatcccactagtaccaccatattcgtcaactactaagacaattggtgtgtgcttagaaatcatcaagtgcaagatatcttgaattggcattgattcaggtaccgtgataatagttctaataattcttgttactggtacgttgccatcaatttggctttgttgcacaatgtcgtacgcataaacataacccacaacgtcatctttatcattatcacgcacaactggaaaacgactgtagccttcttccaagtattttttcaaggcataggcaattgtatcagttgaatcaagtactgacaatcttgttctgtcagtcatgatgtccttagcaaccttatcgtttaattcgaaagctctttccatataagttaagtcttctttatcaagcgaaccaccatgaaccgcattacgcgacaacttgatgatttcagattgtgaataaacttcattttcttcatcagctggagtaaagcccatcaattttaagattccattggagctagtatttaatagccaaacgaatggataaacaatcgtatggaaaatatgaagtggcgtaacgatccccatcatcatcggtactggcttgtcaatcgcaatattcttaggcacaacttcagttaagacaacttccaaataagttaataaaactacgcctaagattgcactaactgacttgatgagtgaatcattcattggcgtcaaatggaaaagatcttccaatatggttgcgaatgtatcagccgagaaccaacccaagactacaccaaccaaagtggtaccaacctgagtagttgacaaatactcattcaagttgtgcgtcatatgcaaagcacgacgcaactttttcttatttccttgacccttagcaagcatatcttcgagctgacttggtctagtttgaactaacgcaaattccgcagcaacaaagaatgatgcaacgataaatattaataatgttgcaactaaattagttactatttgagctggactcaaagtattatcacctttttttacaaatatattactaaaacctattttaccatttcttgcctaaaatagtgcagttttacacaagggataacggttttttgtaatttattcgaccaccttgtaaatttcattaaacggtacacgctttggaataaatttaggatcattaatttcagcattcttgtcgatatagccaactgcaattgccattccgacagcttcatcatctggaatttgggcatattctctaaccaattctgggtatgaaaccattgagtgagctggcatcacacctaagccacggttaatggctaaaagcatgatactttgtgcaaaaattcctaagtcaaaaacggaccaagctggagatttcttcggaaccgttaaaaagataattgctggtgcattgaacattgttttattcgcatcattaaataattgaagcttatttctgaaaaagaaactttgggatgcacccatcgtagccatattacgacttggataagtatcccaatctagtgatagcattgaagcaaaatcttcatgtgcaacttctttatcatcaatctttttagctgaagcagccttaaacttgcttaaagcatcccccatcaaaacatatgcacgccatggctgagaattaagcaatgaaggtgattgctgtgccattttaacgattccagcaattgttttttcttgtaattttctattagtaaacttccgcgttacatgttccttttcataaacatccttaaaattcatttttcctcaattcctttttgcttatataataacaatctatattttattatagtaaaaaactgttaaaaagcttaattattgctcttttcttgctttttcttttctgctgcctgtttttttaaataagcactcattgcaagatcattttttcgcatagcaataaacgcagtaatggttaaagttaatccgccaagacaaatcacaagtaagccaatcggaaacaagaagtctgctcccttaggaataaatgatgccttaattacccagcatgctataccaattaacatcaaaactatacccacaatgactgccttagtgttcggtcgatatcttttcataaatgcccttctttcttaattaacattctaacagaaaaagcttagcttcaacgtagaagctaagccgaaaactagagaaatagtcgttaaatttttacatgagagaggggaaagttgactatttaagttcgatagtttgtactttttgggaatgttcaacactgcctttttcaatcggagtaactgacttaatcaggtccatgttggtgtagacaacgatgcagctgtcatcgtatcccttgtctgtaatcatttggaaatccattgtggctaagggttgacctttcttaactttatcgccttgactaacattcactgtaaacggagcaccttttagttcaacagtatcaagacccaagtgaatcaaaaactcaataccttggtcattcgtgataccaatagcatgtttagttgggaagagtgtggaaatactaccatcaactggtgcatagatatgattatccttaggcttgatagcatagccatcacctaacatcttagttgagaagacatcgtcttttacatcagtaattggcataatgtcgccgtcaactaccgcatctacttcaatacccttattctttttcttaaagaaattaaacataattaataacctctggatttctaaaattcaagtaataatatcaacataaagcttgcgagtaataaaccagctgcagtaagtgaaattgcgattattactcgactaacgccatcttgtgtcttcttcaaagctcttgctcgataaaaacctaagatagctaatactacgcaaagcaagttgccaacaaagagctgagcaatcatctgacttcccatcaagaagcgataagtctgtcgattgattaaaaactgcttgtggtttaacaacatatagtagcctagtatgaagtcaacgatagcaacgattgtactaatcgcaatcatcggctgcttcataatcatcatccgaatcgattgaccagaagcaccgcttcgtagtgcaatcatcgcccaaaacaatagtggagcaatgaaaagtacgtatgaataccaagtcaaaatcttcttagtatccaagtgcatgctttcggttattcgatcgataaagttgccaacttttcgtttactaattgcccacattgatctctacatcctctccttgactctgttgccaagctacatattcactaattaccaaatcaattaagaagtacgctggggtaaaggcaaccttcccgctcttaaagtcggcatcatcagtaaaggcaatcgttggaaaataaatgttgtgctgcactaatgaagctaatttattttgcttcaggttagtgaacgaaacatatttgaatttatcattcactagttccaacttagtgatttcctcattgatcgttttattatcacccgtaaacgagataataaacaaaacatcgcctttttgagcaaagcgtcccgcagcttttaactcctctaatgctgatggcaaaacagttgcatgcttgccaactacaaacaattcatgagccaaatattgtgcgattaactcttgttgccaaccagtagagtaaatgtaaattgtccctgcattatctaaatcgcgatacaagctattgaaatcacgttgtttgaaatacttcaacacgtctgaatttactttactaagttcccgcgcaaaattattttcaattttgattggtttttgcttcgattcggctaattcgaccaaatcaaatttaagctcactgtagccacttagtcctagctttttacataaccggaaaattgcggattcggatacataaagctttttagctaatttggctaagcttaatttgctacagtctctcggattatttagaacatattgaactatctgtttttcagaatcattcaacttatgactattgtcatagaccattgatctcaaatttgccataatacctgtgcccttatcaatatataatttatatattaatacgcgtggtgctagttaaatcgttctagacaatatgccatattataagctaaaatagctatttctagccgttgttgaaaacctactaagctcctggctcgattattctcagcattgtaatagctaagcaaagaaaagtcgctttcgattgttcttctaattgccattaactgatgatcattatgctttttagcacccctcatgtttttacgatatggtgtccaaagcacgtatcccatacgctttagcttggctgctaagtcttttcctaaatagccttcatctcctaaaagataatggttaattggatgagcattgatcatcaattctaccgtctcttttgcatcatgtaccgacgccttagtaactgcgtagtcaagcagatagccatcatcactcactattgcgtggactttgaagccataatagtagatttttttcgtcgctttataaccaatatcggctatgccacggaagatcttaacgtgataattgcgaacaggctgacaaactggaatcggaaaactgtcgataatcaataattctccacctacctttacttcctgattccaaccctgacggatacaacgaattagaggcaagagcattcgagctcgacggttaaaacgagaatgagataagccaacgaagaatttacagaatcttcgttgagattcaattccaatttcagtttgccaaatgagcatcgctaagatagaactatcaggaagcttggtctgatcaacatttttacgatgtttaagtccatcaggcgcataaagcttatacagcgagcgacaaatcacatttaaccgattaaaactaacttgtaaatggtgagaaaaacgcttaagcttgagatagttcaattagatcagactcttttctatttaaattacttacaacttgagtctagtctaattggacttttttattaactaaaacgatttaactagcaccacgcgtatattaatgataacacaagcgctttcagattatagcaattgtttcatttgatcaacaacttgatcggcatccaatccgacaacgatgtcaacctcgttgttatctttatgttgtacttcgtaagaatctgcgatcttcttgaattctgaatctggagcgaccttcttaggatcaacgacatgagttcttactctagttgagcaagcaatgacatcttgaatgttggagtcaccaccaagcaagtcaacgataccagtagctctttcaatataaggattatcttgttcagttgataccttagcgtcgccaccttgttgttgcattaaagtgttcatttcatcaagaacttgaggtacgtccaaacctacgataacttggatagccttaccgtggtgtacgacattgacagccttgtttgctttaaatgcggcatctgaagcaactttatttggatcggcaacagatacacgtaatctagtagcacatgaactcaattctgtaatgtttgaaggaccacctaataattcaaggtaagcagttgctctttcaatgtaagggtcattagcgtccttaccagcagcttctgcagccttcttagccttgtattctttctttgaaagaaggtgaacatcttgatcatcggcttcacgacctggagtaatgtaattgaacttctcgatcatgatcttgaagacaaagtaagtaataataccgaagataataccaacgataaattccatcacataggtcttccagtggttttgccaaagtggaatccagttcattgaagcgataccgatcgcaccatctgacatgaatcctcttaaacccaaggcccacataactgtgttcatcgtggctgacaatactgagtaaactacccaaagaactggagcagcaaacaaataagtaaagtcgataggttcagtaataccagctaatactgaggttaaagcagctgggataagcaaagctgaagtttgcttcttcttgttcttcttagcagttgcgtagaaggcaagacagataaatggtactaagaataccttttcgttaccgtaaagttggaatccttcaactgaagcgatttgtgaaagtggtttagtacttgcagcgtattcagcaaggtgtttcaaccagtatggttgcaaaccgccggcaacaacggctggaccgaattggaatggaatgtataccaagtggtgaagaccagtaggaatcaatacacggttcaagaattggtaaatccaaacaccgataaatccactatctacgatgaagtgttgcatgctggtgatacccatttgaacttttggccagccccagcaggtaatgagtgctaaaggaatcattacgaagaatgctaaagcgtagacataagttgaaccttggaaagtaccaagccagtctggcaacttcttatcaaagtacttattgtgtaaccacactacaataagagcaacaaccaaggcacctaagatactagtgtcaagagtcttgataccagcaatgttagttaaaccatggttagtagcgttagcaacaatttggatcttgtcaaagttaggaataccaaaagctgcaccccagtgggtaagcattgcaccgatgaagtagttgtaagtcaagtaagcaataactgcttccatggctgctctacctctagccttgttggctaaaccgattggcaaacctacagtaaacaaaataccttcttggttgaacactgtccaaccaccagctgaaattgtgtcccaaactgagttccatgtagttcccgggttggcaattaaaccaaacagagtcgggttattgaacaaactacctaaagctacgacaatacccgcaaacgagaacagcataactgggacgaacatagcggccccaaaccgctgtattttctgcatcataatcgtttacctctgaagaaaaaaattaaatcaataacttattcttacatctacacctgcatctacatctttatttcatcagatcaagtcaaccgcaaggtgctcatacaattgacttttgccatttgtgcttcacacaaatatttactcctcaaaaatgttttaagataaaacgtccagttgatatcaaattctgaacttaactctatcttattagctagcttacatttttatttataccatagttttaagctaatgtaagcgttttttaaaactatgacttattgtttcataaagttaagatgatatttcatttcatgaaatttatttcagcccttcaatgatgtatataccaatatttatacccctttattttgcttgtcgcgcctatgtttaatcatttactttacatacaaaaataacatgtcaataaatatgctatagacattctctatttatacacataaaatcctctgaaatatatttcatttcatgaaacgaaacaagtgataaaacctttttcctttccaagatgaactactttgcttactgaaataacacaaagtctggcataattaacggtaagttaaatgcacaggaggaattattatgacaatcaaatttattgcacttgataccgacggtaccttgcttaattcaacaggtaagattttgcccagtacaaaaaaggcagttaaaacagctttagaccaaggaataaaagttgctttatgttctggtcggccaatcgcaggattaaaacattttatggacgaattaggaattattggacctaatcaatatgctatcactcttaatggcgcaattacccgcacagcagatggcaagataatgactaaagatctagtttctaatcgactttatcgtaaaatgtatgcttttgctaacgagcatcatttaccttttaacgttgtttcccctgattcaaaaataattacaggagatcatgatgttgatttaatggtttatactcaagcttacgaaaatagtgcgactttatacattagagagctagatgaattgcctagtgattttgaaattgctaaaggttgttttgccactaaagctaagttgttagaccaatgggaggataaaattcgccaagaatttgggcaagagctgtatattgttcgtgccgacgattgcttcttagagctacttcaccctaatgttaataaaggaaccggattaaaagaattaactgaaaaacttggcattactccagaagaggtcatggcaattggagacgaaagaaatgatattaccatgtttgactttgctggaacagctgtttgcatgggtaatggctccgaagaagcgaaaaagcatgctgattatgttaccacttcaaatgacgaagatggcatcagcaatgctcttgagaaatttttatgaacaacctaaaacaagtatctgagaagtgattaatctttcctagatacttgttttattatttgttcaaatattcacgcaaagctggcaaaactttctccgcctcaactcgtccgacctcatacactcgtcgcatctcttttttatctgtttctaaagtgccaatttcaagcggaaactgtgaacgaataataaaagcttggtcagcagcttcatcttttaccatctgatcaagcaccgcattataatcctcagctctagtagccaatttttttactactgcggggtatttccttaaaattactttttccagtggatagagcttactctgctttttgcgataagacttcggctgtgtagcaatgactacctttttatcacagttttgctgctctaaaaaatcatacggaattgaatcagatacaccgccatcaaagtaataatgcccatgaattgcaactggatgagcaaaaaatggaatcgacgacgaggctctaatccactctaagtcaacataacctgcatcatgtaattgatgataaaccggctcacctgttgcagcatcagttgcaacacaccaaaagtccattggattagtcataaatttttctttacctgaattgtcaaattaagtgcaacagttaggttatgaagagatatattgcttgaagagttcctctgctgtgtgatattggaggattcggcgatatttgtggttaatggcatcagttgcctgttgaacataagcttttgacttgtctttcatgctcttgcccttagggaagaattgacgcaaaagaccattgcagttctcattggtgcccctttcccatggagaatatgggtgagcaaagtaaatctggcagcccttgatcttggtcatatccgcaaactcagagccattgtcaaacgtgattgatttaaaccaggcaggatgtctgtcaatctccttttgaagcagcctttggcatgtgcttgcccgatagtcaggaatcttgataactacttcaaagcgtgtggttctttcagtcaaagtcattaaagcaggctgattcttgcgtctgacgcctttaaccagatctccttcccagtgcagcggagcttttctgtcttcaacctccttaggacgctgttcaatggaattgccaagatgcttcttgtgcaaagcgtgaccgccatggctgtgatgacgcttgttcctgcgtcttttgagcttcataggcagatcaatattgcttatgtccagcaagccctgatcaatatagcgatagacggttggtgtgctgggacaagggtagcctggcatagtccttttgaattcaccaacgaactcatcgatgctggtggcatcaaatttagctttaaagcgtctggagagcattctcaaaaagacagcataatgcttcaatggattgcgctgatagcagtttttgcgacgcttctcataataaatctgtgcagtatcagcgtaatagtgctcatacaataaatagctgctgtctctttgcaggacgcttccgcgtttgatttcgcgactgattgtcgacttatggcagccaacttcttgagcgataacagtacgggaagttatgccggaatccagcattgcttgaatttgtccacgttgtacgctggttaattgatgatagtgcttagaaatgctagaatttgaattggtcatgaagatcttcctttcttgatttttcgtcacttcaagtttaggtcttcatggcctttttgtttaacacttagtgttgcacttcaattttaaatccgggaaatttttctttatcaaaaacatccaacttatcaggcaaaatatggtaacaaaagttagccgcatacaaattgcctgaccgccgccatgatttccaactagcataatatggtttccccgcaaagcgcatgttgtagcgcaatactcttcccttttgctccgacttcaagtttacgccaaaggcagcaccggctgaaacgccaattgctaaatcaaaggttatgtcattttctaaaaacacatcaattatgccagctgtaaacagcccacgcattgctccaccttcaagtactaacccacttttcatattttccctctttatcaaaaaaagacctacgcttttcgcataggtctaatttattcttattttaattttacttcaagcccgaccattgccattcagttacttctggcatatccttaccattgtcacgaatgtattgatggtgcttttcaagcaagtcatccatatgactaatgaagtccgcattcttgccctttagcttatcgatgctttcaaccgcatccttagccaaatcgaagcggtcaaggtggttcaagacacgcatatcaaatggagtagtgatatcaccattttcttcatagcagtgaatatgaacattgtagcgcttgcgagcaaaccagatggattccatcatgctcttgtagccatgccatgcaaagattactggcacatccttagggaataatctgtcaaattcttcagttgaaagaccattcttgttgtcctttggatccattaacttcataacatcaactacgttaatgtagcgaatcttcaaatctgggaacttcttgtgcaagatatcgattgcggctaaagtttcaatagttggttcagtttcagttgaagcaaagacaacatctggcttaacgcccttgatcagttgaagcccaatcaatgtagcctaagcccttgtctaccaacttcttagcttcttcaattgagaaccattgtggacgaggctgcttagaagttaccaagacattgatgcattctctgtcttgcagtgccttgtcgcccactgccaaaagcgtattagtgtctgatggcaagtattcatgaacaagatctggacggttcttttcatacaagtgagtcaagatacctggatcttggtgagtgtaaccattgtggtcttgttggaagacagttgaagttgcgacaaagttaagtgatggataatcatgacgccagtattgttccttagcctttcttaaccacttcatgtgttgggtaagcattgagtctactacacgaccaaaggcttcataagtagcgaagaacccatgacggccagtcaaaacgtagccttcaaggaagccctcatcttggtgctctgacaattgtgagtcaattactcgaccgcttggagccaagttttcatcatttggttcatgaacttctggctcccattgacgtttttgattatcaagcaattggaacaaacggtttgatttagattcatctgggccaaaaccgcggaaagtagttgggttgagcttagcaacttcatccaagtacttagcccattcaaccatgtcttgggcttcaactgaacctggcttgtcaaacttcaaagcaaatttgcggtagtctggcaagttcaaacgcttagcatcaaggcaaccattagtgattgggttcatggccattctatggtcacccttagcagtgttttcagtcacgatttccttaggtgaaccatcttcgttaaataattcttccggcttgtagctttccagccaatcagtaagcatatcagcgtgttccatatcgccttgagcaactggaattggaatttggtgggcacggaagctgttttcaattgggttgccatccaagtccttctttggaccagtccagcccttagggcattggaagataatcattggccaatgtggcaaggtagcgtcattgttttcacgggcatgcttttgaatagccttgatttcttcaatgacttcatccatggtcttagccatttcttcgtgaacctgcattgggtccttttcaccgtcaaaacgaccacccttaaagactgaaacaaagtgaggatcccagcccatgccacggaagtattcggttaattctttgtcactcatacgagaaacaatagttggattagaaatcttaaacccattgatttgcaaaattggtaataccgcaccatctttaattggattaataaacttgttactaaaccaactagctgcaagtggaccagtttctgattcaccatcaccaatttcaacagcagcaatgacgtcaggattatctaagatagcaccagtaccgtgtgaaagtgagtaacctaattccccaccttcatgaattgatccaggagtttcaggagcagcatgtgatgccacaccacctgggaaactgaagcgcttaaacaatttagccatacccttttcatcttgggtgatctctggatagcgttcagtgtatgaaccatccagatatgagttagaaaccattacttgaccaccatgacctgaaccttcaatatagaacatatccagatcatacttctttaacactctgtttaagtgagcataaataaagttttgcggagcaatagttccccagtgaccaattggctttggcttaacatcttcagcaactaaaggtgttttaagaagtggggccttcattaagaaaagttgaccaactgataagtaatttgctgcacgccaataagcatcgacgctctttaaatattcttttgaatcgtaatctacagccatcttattctcctttgagcatctaagagtgctctttttcatttgttcttttgtttacacttatatcataccaaattatctaaaaagttcaattatttttataattgtatcctaccaattaaaaaataagtatttaatttaaaattgcatcccttttttgttgctatatcaaccttttaatgctttgatataagtatttagttgcttaaatactgataagtacagataaacaaatatcaaatactgacataatcagtgcaaaattattcattcatgttagattactaaatggagggcatgagatgacccaagaagaaagattaatacaaattaaacagttacttaaaaaaaagcaccaattatcaactagacagattgcagctcacttcaatgtatcatttgatacggcaagacgagatgtaattcatctaactgaaactggtcaagcaattagagttcatggtggtttgatggaaattaattgcaacagcgtacctgattttttagcaagaaatcaagtacaatcaccggttaagatgaaaatggctagaatggcaaagagatttgttcatccaggtcaatgtgatttcatcggttcatcaactacgttaaagcagctctgtccaatgcttaatggtattgacatgcagatcgtcacgaattcaatcgacaacgcattaagcttattagcaatagaaatcccatcagtcagattgttgggcggcgttatcaacaaaaagcagcgtttcatttattctgaaacagcattagaaacattgcgtcaaatccatttcaatactgcatttattggtggatctcgaatcagagatgacggcgtatatacaccaagcatggctgattccaaaattgtcgaaaccgccgctagtcgcgctaatcaagttgtattagttgccgaaaaatataaatttactaatcaatcctcttcgccatacatgtctgtccccctcaatcagatcgatgtccttattaccgacaccccattgcctgaggaattaaagcatcattttaatccaaaaacgcaaattatacctgttttaaaggagtgatagttatgttcagtctctttaaccaaaagaaacaaagcgaaagtcgtgaagtataccaagatttgaagaatttttataatagtttttttagcaatatctacaatgaaatgaatattggtcgctatcggcagattcgcgatgcaattgggcttgttcttaataagttcgacagtggtgatcatcctcttgaatacactagcaaattggtcatgtatattcaggctcgaattgccatgaatcacctgcatctaactcatgaacagcaagacctaatgaaaaagctaagtgacgctaccaaatatgtaaatctttcttatgtttatctgagtccgctcacttcggtagaacaatttgttaatatttaagtgtatctagaacctgctctagatgaaaaaatgaatccaaaaagaccgagtagctgatctgctcggcctttttatgcaataatattgttaaaagatatagattttttcaaaggaaataattatgacaaaattaccattcaaagttgttgctgtcgatatggatggcactttcatgcatgatgatcaaactttcgatcacaagcgctttgaccgcatcttaacagaattacacaaaaaggggattcactttatcgtttcaagtgggcgcccttataccagattacgcaaagattttgctggctttttaaaccgaatcgacatgattgctgacaatggctcgcttttgcttcaagataatcaaattattagcactcatttgctcacttataaaacaaccttagatctaataagttttatcaaagagcattattccaagagttcaattattgtcactgggatcaacaattcatatacaactattaatgcttctcctagttttaagcagacgatgaacttctattaccccgatcgaattgaagttactgatttagcagcggctatcaatccgcaggatatgattactaaaatcaccttaagttatcaatatgatttttccgcggaattagaaaaagaattcaaccaaacccatgccgagaagattcactgtacttctagtggtttcggtttgcttgatattgtgccttacagcgttaataaagggagcgctctaaaatacttcttacgctattttggtgctaaacccaatgaattaattgcctttggcgacggaatgaatgatgctgagatgttaaaactagccggttacagttatgcgatggctaatgcagaagatcaagttaagaaaatcgccaagtatgaggccccgagtaacaatgatgatggggttttagaggtgcttgattcatatttagctaaagtagagaaataataattactgtaaactaaaaccgtctgaatgagcaaaataaaaaagtagccaagttttcttaaactaattgacttaagaaaacacagctactttttatttacccaaattaacaaaggtattaaagttcatataatgataatgcacgcgcatatttgatacttcaaacggcgtcccatcatccaagaagaagatcccttccattacaccaacaggttcagtcggcttcaaatttagcttctgctgatcttcttcattcgatggttcaacagtgatattcaagaatgacttagtaacggtctttccctgttcatcttccaaatagttaaacaaagacttttgtaaagtctctggctttaattccggcacaattttaatcggcaaatatccagtctcaattaaaaatggttgttcatctaacagtcgcagacgcttgaattcataaacaaaatcattttcatttaaaaataagtcttccgcaatttctttagttgccttaatcacatgaaaatcaagcaacttaatttgttgttttttaccagggactttaaaagaatcagtgattccaagattcgatccatcataacgaaacattgcctgtttgcgcaaatatagtggattaataaaagttccactacctcgctttttaaaaacgatcccttgttgagccaacagctccagcgcacgcttcattgatgatcgacttacctgatagtgttcggctagactgcgttcatcaggcagtcgcatccccttatactgattattcaaaatattctgtttaatgtcatgcataactgtccgataaacataatctgccattattctcgtccttgatctgcctttttaatactatcaataaaccaagttgcaaacttatccaagtccacatctgtcgcaatctccgcattggcatgttcttggtccataaaatccattacgctggcaccataagtatattgcccgcgcaattcaatattcacatttgcctttttcattgtaaacatttccggatgaagcataattccaactgcagtcggatcataaatcttaattcgcggatcaccgtctggttcatgaatgttagagaaaagtgaatacaacatattacccacttcaccacatgtcttaactttatccatttgctctggtgttaaatgggccttatttccaatttcaagtggagcaaccttaactagcaatccactatgaaaaactacctgcgctgcttccggatctcccgcaatattatattccgcaaatgggctatgatttccgtgaccaatattaccacccataattacaatttccgcaatattttctttaacttcaggatattgcttaaaaagtaaggcaaagtcagttaatggtccaatgcccatcagagttattttttctggactacttttaatttccttagccatcaacgttgcagcaagaccaggttcaattaaagaatcatcagcttgttcaaattcaaagccggcaatccctgttttaccatgaaccgaagcagcactaatcattggtgccaccagtggttgattagcacccactacgacaggaaccttagtatgcaaaaacttttctaaatttaaggtattttgcaaggtatatttcagtgccacgttaccccaagtaggcacaatcatgcgcacatcaagttcttgtgcaaaaagactaatcgtcatggcagcaatgtcatcaatgccaggatcagtactgataattaaaggtttcttgttcataaaattatcctctcgtattaagtacttttataatagcaaaaaaccaaccaattaagaaagtggttggttttattctaataattatttttcttttttgggtttaatacgttgaatgtgttcttcttcatggtcacctaatactaatggcacacgctcaaccacagtatcggcatactccagtccgaaccaagatgcagggttagaagataaattctgcagccatactcttgcttcaaccatgaacttttcatagcctgtcaatttagttaatggactaattacgtcgttaacaattacaaaggcgaagtcccctacatcacgacccggtgtagtagtgaattgttgtggttgagcttcaatcgttccatcagcgatcaaatcatgaacaatttgccgcaaataaacatttacactggtttgttttctaaaacctaaatacaactgaacgttaattacattcttagtaccataagtattgaccgcgtattctgcagtatatggctcgttagtaacattaacagttacaaaccagtaagccttagcccgtttaggtctcttatccaaaattgaataaagcatttcgcgcttaatgaatttattatacttaaccttagccatataaactacattcgtagcgtaaactggataatcatcacagtggctcaactcagtcaacatatctgtatattcatctaagcgaacataagcattctgctcctcacgcttatcacggatcttattgccatagaaccacacgtacatgattgccaaaataaaaccagcaattaaaacagtgacgtaaccgccatgcaaaaacttagttaagcttgagaataagaacatcccttcaataaaggcaaagactactaagaaaatgcatcgtattgatagcgcggtaccttttttacccagatattcaaataataagatagttgtcatcaacatggtaaccgtgatggccagaccatatgctgcttccatatgatgtgaagttctaaataagaaaacaattgcaactgtaatgacacagatcatcttattaattgaaggaatataaatctgtcccttctcatttgaaggatagataatattcattcttggtaaaaattttaaactacttgcttcagctactaaagtgaatgaacccgtaatcaaagcctgagaagcaataatagcggcaatcgtagccaaagcaatagcaaacaatcttagactacttggtactgcttcaaaaaatggattgaaatcaccattaccagcatgataattagcattttgtaaaatccagacgccttgccctaaatagtttaaaatcaagcaaacaaacacataaggccaagagcccataatattacttttcccgacatgtccgacatctgaataaagagcctcagcaccagtagttgccaagaaaattgaacctaaaatcaaaatacccactttattagcaggactaaataaaatacgcaaagcatgaattggattaattgcatcaagcaaactccaatcatggcttaagttcataaatccaatgagccctaaaaaagtaaaccacaggagcatgattggaccaaaggccttaccaatcacactcgttcccattctttgaattgaaaatagtaaaaccaggataacaatagtaatcaagataaccatatcttgcgacgaaactggaattacatcaccaaagcgcatatttttcaatccttcaattgaagttgtaacagtcacagctggagttaatgtcccatcagctaacaatgctgctccaccaattaaagctgggataactagccatttagccctctttctaaccaatgcataaagagagaagatccctccttcaccatgattagtcgccttcaaggcaattatcacatatttgaccgttgtcaataatgtaacagtccaaaaaatcaacgaaatggagccaacaattagttcacggttaacattactaatcccaccattttcagtcacaatcgacttcataacatacaaaggactagtaccaatatcaccatagacaataccgatagcaattaaaaggccagtaaaagacaccttttgcttaccagatattttattcataagtttttatcctctatttcacttaaaaattgaaatttttactagtatagaaaaagtctagattttttgcaataaaaatatatctttttgaaaaataaaaaagaagatgaaatctccttcagtcacttaatttactttttcttatcttcgatggtgccatcactatgagcaataattacttcgtcacacatatccaggaacaagccatgttcaactacgccaacagtatgatcaaggtaatcagctaaaccatgaggtgctggaacaggatctgcagccaaatcaataatataatttccatagtgagtcacataacgttgattgccatccatacgccaccgaggctttaatccttcttgttcaaaacgtttaaagttttgttcacaagaaattggtaaaacttcaactggtaatgggaagccgcttaaacgatgcactaattttgattcatcaacgatccaaatgatcttcttagaattgattgctacatttttttctaaagttaatgcaccaccgccgcctttgattccatccaagttatcggtaacccgatcagcaccatctacagttaaatcagcttgatcaatatcggccaattcactaactttaaagcctaagccctcaagttgttttttactacggttactagtagttacgatagccttcagttttaagccgtcttcatctttgcgcttacctaaagcatcaatgaaaaaggcaacggttgaacctgtaccaacgcccaataccatacctgatttaaccatggcagctgctttttctgctgcttcttttttcaaacgatcttgttcttgcttgttcattattcatcatcctccatcgcctgtttaacttcctgttcagttggaattgaaggctgagcacctaaacgttgtacggcaattgaagatgcacgacttgcaattttagctgcttcttcaaagttagataggccagaatttaaattgcttaccaaatatccaataaaggtatctcctgcaccagtagtatcggctgcttcaactttataagtcggtattaattcttcaacatcgggagttgaaatatacgcacccttatcaccataggtaataaccacgttttttacaccaagcatgtgtagtttttctgcattagtggccagcgttgaattatctttaattgcaatgccagtgatcttggcactttcagtttcattcggtgtaatgatatcagtatattgcagtaattctttaggaatctcatcaactgcaggagctggatttaaaatagtgatttttttggcctttttagcaatcttaaatgcttcaagcgtcacatctagtgggatttcgaattgagcaattacacaatcccaactcttaatcaaatcaccagctgcacggatatcttccactgtcagttcataatttgcgccgtgatcaataatgatgtcattttgcccagcttcattcaacgtgatataagcatggcctgtctttgctcccattgtggtttgcacataagttgtgtccacgccataactcttgagctgatgcgtgataaaatttccttcactatcttcacctacacggttaataaagtaagtttcagctccacttttagcagctgcaattgcctgattagcacccttaccgccaccagcagtagtaatgtctagcgcattaattgtttcaccaggcttaggaaagtcttttacatgtaatgttgtatcaacattacttgaaccaataactacaatcttcttcattatgagcatcctcttctaaaaatggatttattcaacctcaattataacaaaaaacgtattcaaaatattgaacacacatttttgaaatcttactgtaaaataccaccattaacgaagccttttaagcgctcagcttcccacttcaatgtatctgaatcgtcaacttgcgagatcttatacccaacgaaatatggtgaagcatagaatcgtggaataatcttgcaacaagtaccttgaccatcattaattggatagaaaaataagttataagaatcaacaccatgtgacaagactgaacgcacatattgtgtgcccttttgaatcaaatcggcccaagtatccaaattagtattatcatgtgtcaaaatatttacttcttggtagccttgaactggacgcgctgataagttcatttcaactgaacccgaacgcccgacttcaaatcctttaaagttatcagcgccaatatcgtgatagccatctttatgatataagcccacgatctgcatatgtggatgagttaaagaaccatcagacttgggaccaaaatttttataccaaagcacactctgataacggcctgaattattcattttttgaaaacacttcaagccaaacttcatcaactcttgattatcttcacgcgtataagttgaaatatctccctggtgatcacttgattcaattaaaattgtttgattagtatcctttaacgtagggtacttattcttcaaccaaatcttatcgccatctttttcataaatattaattagatgctgcacatcacaaaaaggacagccagcattctgatttccttgccgattaccataatcataatcatatggcttacgcttaccaattgaatattcatacactaaaggattcttgtccatatttttcacctgctaaaccaaagatatcatacatttaacatcattttaacaattttatcggttaattgtgaacatttttattaataaagctaggaatagtacgtctatctatgataaactacctttgtaaaagaaatacatgatatacatgagaggaagaatcatgaaattctataaaaaattggtacttactggtgccacagctttagctgttctaggcttgagtgcatgttcaaataataattctagttcatcttcatctaataagaagattccaactaagattaacaagaagactaccgttaccttttggtattcactaactggtaatgcgcaaagcagtttgcaaaaattgactaaagattttgaaaagaaaaatcctaacattactatcaagttgcaaagccaaggcggcaactactctgatttacaatctaagttggtttcaggtttgcaatcaccaaaggatttaccgacaattactcaagcttatcctggctggctttacaatgctgccaagaacaatatgcttgttaacctaaccccatacattaacaattctgaaattggctggggctcatatgctaagagtggcattaagaaagctctttgggatggtgcaaacatcaacggtacacaatatggtgttcctttcaacaagtcagttgaagtacttttctacaataagaccttacttgataagtatgatgttaaagtcccaactaacatgagtgaattggcttctgcatccgcaaaaatttaccgtgaaagtcaccacaaagtacgcggtgttggatttgatgctttaaacaattactacatgatgcaaatgaaggaaacttacggcaaagacttcaataagaacttaaactttgctgccaaggattccgttaaagccatcaactactacgctaatggagtaagagccggctacttcatgcaagctggtactgaaaagtacatgtcaactccattcaacaatggtcgcgttgctatgttcatcggttcaactgccaatgaagcttaccttaagcaaggacttaagaagggttacacttatggtgtagctgctcgtccaagcacgatgaacgtacaacaaggtactgacatttatatgttcaaaaaagcaaccgcaatgcaaaagtcagctgcgtttaagtaccttaagttcttaacttctaagtcatcacaactttactgggctaaacaaacaggctacatgccagttaatactgctgctatcaacgacaaggtttaccaatctgccaagaacagcaagataccagcaattattgccaagacctctaagaacctttacttcttaccagtaactaagaatgctactgccgcatatgatcaagttaatgctaacatgcaaaccattttagctaaggcaagtaaaaagcaatcatggaatagcgatatcaagactggtaaagataagcttgatgctgcttggaagcaataatttttcaaataaaatatctatcaaaaaacagaagtcaggctgaattcaatgtcattaagttaagacattgacaaattgaatctaatctctgtagaaccgaatcattatgatttggttctttttttgcataaaataaaggcgaaaagaacctaccttttcgccctctgattaaattattaaaccttcaaaattattgccagaaagctggtgttaattatgaaagcccttcacagaaatattttagatcgtcttgatcaaattatcaatgatactggaaagcatattcatgattttatcgatgatcctcatgccttcactaggaagcggtttttagatgcagctacagtcattaaaactactattaatatgcaaggaaaagatttgaccagtgagttgtttagagcttttggccaaaaagctattaaaaataacgataaagtagtcagtacttccgcttatgtccaacgcaaaggtcagctttcacccgcatgttttaagcatattctaactgtatttaatcagaatttatttaatatccagttatttgatcataaatatcgtatatttgccattgatgggtctgattttaatcaaatctggaatcctaaatcagagaatatcgttggaaatctcaatcataaaggaaagccatattgccaaattcatgttaatgcactctatgacctgttaaataatacttatcaagactgcatctttcagcctaagtcaaagatggatgaacgtaaagccgccgttcaaatgcttaaaaagctaaattgcggaccatatatagttactatggatcgaggttataccggctttaacatgattgaaaattgtaatcgcctgcctaactgttattatgtcatacgtactaaaacgggatatggcgcatttaaggaagtagctgagttgcctaatcaagagtgtgataaggatatagcttgctgggtgactacctctaattattattatgaaacccataaggctacagaaaacgttcatttggttaaccatcattaccgtcaatatataaaatatcggtctaaaaataccaaagatggcagctgggactttggagagttatgtacaataaaatttcgtgcctgtaaatttagaattaatgatcctaaatcaggcaaagaagaatgggaagttgttctaactaatctaaatagagccgattatcccttaaaaaggatcaaagagatctaccatttgcgctggggcattgaaacttcattcaaaaagttgaaatatgctttaggtagcgtacagtttcattccaagcaggatagatttattgaaatggagatctatgcccacatgattatgtttaacgcagtcagtcaaattgatgctcaagcatatgtaccacaaaaaaactgcaagtatcaatatgcgatcaatttcaaacagtcatgttttgtcatccaggctatgtatataatttcttcttcaactgaaatctttaaaaagattcttattcaaattagtcattacacaattccgatcagaccaggacgaaaagacaaaagaaatctcaaacccaaatcagctgtatattatttatatcgtgtagcctaatttctaaacaaaatttgggtttatttggcatgaaaaaagatcattcaaatgcgataaatcacaaatgaatgatcttaaaagtccaagtcgataatttgtcaatgtcttaacttaatgacattgagtattaattgaacttcttttttttacctaattatttactaaaaatggatattgaatttgatcattatcagttacattcaacttgtaacgagcacgatataaagccttttctaccgctaattgccctgcagttgtggccattgcaatcgaatatgacttgtgtggtgaattgatcaggatttgactgatagaatgcttaatgtatgactggattagaatgacataattcgattccttacatgcacgtaaaacattagaagcctgtttcatctcgataattcgagctactccattgtgtgcttcaatcaccttagccaagttagaggttaagctcttgtctcctactacaacggtaactcgttttttatcgaggtcaaaatcaattcgggaagcatagtcttcattttgcttttcagacgactgcttctcctttttttctaattgatgcaataaagacttgtgtctacctttagtcttgtgcttttccgtttctttatttttatccggcttttccttcttttctggaatagtaacttcagcttcggcataacgccatctaaccctaatgaaggatggatcactgactcgccaaacaatactaatcaggtcattttcgtgtaagttaaagtgacttacagtattcatgtctaagtataaaatagctttttcaggatttacttgacttaggtttttgccattagagtcctgcttgatgtataaaccaaaagaatcacggtgaactaccgctggaccaaattcgataatttcctcatctggcgcaaaagactttgcatgatgctcaactttaataattggacgattgccactgtcatttaagtgatctagcaaagtaactgtatcaccgttttccagcttttcaattctagtcaagtgttcattaaaatattgtactgaatgaccattctcatccactgcttctgcacctagcagcttacgtctaatctcatattgtttttcctttggtttagccacaggaattattttcttaaccacaggcttaggaataggagttatggtcgcatatttgtttttattctttaaaaccgtaggactcagagctttagcagcttcttcttttttagctttttctttttcaagctcttccttcgtttttttcggctttattttttctacagtattttcatcattttcttttttagtttctatttcagttttattttctagcttattctcagtttttatttctggctcattttttacagcctgatcagctttttccgcaattttaacgacttcattcttattctcaggtggattgcctagtactgcctggttatatattttactaataattttcaacgcaatcattgactgcttcagtgattggggatcgctccccgtcgcctgcattaaatcaataatatcttttctataatcaatcgtcatatatttaccttcttatttcttaaatatgaatattatacaaaaatttttaatgctaatctaagaaactgtcaaatcttttgtgtaaatagatctttctcgtaaattgattttttaattatttatttaatcaaagtaggattctaaggtgtcctgaacctgaccaaagcctttatgaattcgattgaaataacggtcattgtagctcattgcctggatgccaataaatgcatcaagcgactgttcagttggaaattctgccttaggcttagctttacgcttgatgacgttgttaaaggattcaatcatattggttgaataaattgaagctctgatttgtttgggataattgtagaagactagcagatcgggctcaatttccttcaaacctttgatgacatggctataagctttattccatttggcatagaatttgtgcaagacagctgcagcttcttttttgcttgtctgttgatgtatctgcttgaattcgttcatgatcttttcacgatcgtcgacgcgtactttagcgcagatattgcgcatgacatgaaccaggcagcgttgaaaatgagctttaggataagtcctggccaaggctgttttcatgccaacaacaccatcagaaagaaaaagctcaacttgcttcaagcctctggacttcatgttttgaagcatctctgtccaaacttcaatgttctcactaggagcaatgcagtagtcaatgacttccttatgtccattaggtttaatgccaatggcaatatagactgcttcacgctcaaacgtttctcggcgcaaaggaaggtatgtcgcatccaaatagacacagaaaaacttgtcgcttagcttgcgcttgtgataagcctcaatcttggggagcatctgcttggaaatatttgatacttgagctggactataatgactgccatacattttctcaatcaagtcagcgatttctctggtagttacgcctttggagtatagcttgataatcgtgctttccaaaacatcagagtgctgcttgtagtcaggcagcgtgtgctgatgaaactgaccgttgcggtctcgaggcacttgcacttcaattggtccaaactgggtatcaaccttgcggaaataagcaccatttctagaattgccagtattccagccatttctggcatagggatcatagcctagaaaggcagtcaactcagcttctagcaagttattaacagcctgttgtagctctttgcgcaataaatcatttattttgtctggattgaatagagcttgagcaaaatctttggtaaaatcattcatgaaggagttcttctttctgtatgtgtttttttgttcaaaccaatcatacgagaaaggaactcctttttctaatgtttaaagaaataaatttaaggaatcattcatccttacacaaactattttacagtctctaatctaattctttatagatttttatattatttttcctgtaaaaccattataataaaagtagttaaaatatcatttattaaatgagggagactactatgaaaaagaaacttttacttttcgtatcctttttagccggtttattgttcttggtatctacaccaacttatgctagcaagcttcctaaaggctatggtattgctaaaacctttaccacaccaaaagcaacccgtggcacctggtattatcgcgaaaagggtgataaaacaatttctaaggtaaagatcactgctcatagcgtagatggtaaaaagctttacgtaccttcacaaaagttcttcgagaaaaatgtttacaacgtttcagctaagaagcgtaatcagttcatcaaaaaaactgaaaatatttatgctgcagctaactataaaaagggcttcaatgtcaacaattgggttaacttagctggtgatggtgaatactacatccctgttactagaactgttaacggcaaaaaggttaaggcattaagaatagctactggtgctggtccttatactgctgcatatgcatacaaaactaaggcattggttaaataatcattgtctaacgaaaaagcaaattagcataatttgctttttttctacccaaagtcaagtattatcaatgatttaagaaaataaatttacttgttttaatgatgcgaataaggttaaagcaaataagagtttaaatttaagaaaaagcgaaagtaccacaaataagcctatgaatacttgtagtttttccataggttgcttatacttaagttgattatttgatttcagctaaagtcttttattttcggtggctatgttgtaatcatataattgatcatgtttgataagagcaaacattgtgcgtatcagtttatggactgatgcaatggcgattttcttatagccttgtctatttgaagatcgttttttcttgtcataataatcagttatatggcaaggctgcgtagcctttaccgtctccatttgagtaataactcgataaagtatttttctggcaatatgattgccatgcttggtaatgccaagagaactgtctttttcaccagattggtaccttcctggatcaatgccaacaaacgcatcaatttgagctgaagtgctaaaccgtcttagatcaccgagctctgctactaatctcactgctgtaattctagcaacccctgggatactcaaatagatggataaagcacgagcgtttactgctttagccagcttttccatgtagttaattacatagtcgcgttcttgctggagtgaaaataaattagaaatgttcctttgaatagctctaacgataatactatctttggaatcataaggataagcttctctagcaaaagcgtataatcttgtggttaagtaccgtgccctttgttgtcctattccagaaatagaattaagcatttgagttacctgtgtctcattcttttctagaacatatccagcatgtgggaaaagactaacaagcgcccaataaattctgccagatggatgagacagtatttcttcaatttgtgggaaagtggattggaggttgcggtgcaattgatttttagtagtaactatactcctagtaagttcttcataatagcgactggcattctgaagttcatgatactctctgggctgtggatcacgcagcttttgcggggcattaaattgaattaaagccaggcgataagcatctaccttatcagttttattatggcgtaaattattgtccattagctttttcgctttaagcggattaagcttcaaatacttaatatgataatcctctaagaaagcttgcaggcttagagaataaacaccagtagcttcgaaaacaactaaaggagttatcaaatattggttcagttgctcataaagtttttgatagccaaaggaatcattagagattctaaaagattcgccttgtttgatccggtcattaaccacacaaactgtggaagatttactgctaacatcaataccgaaaataatttgtgattccataatataacctccgctgtgaagataaacctctttatcaacctattaattctaattttctaaacacggcatctaagtgcccacagacttcgaagagacttaagaataggtggtaaagcagtccgtttcttttacgacatcaagtgtctaaaaagctgaagacttgatttgctttatcttcactttctattttagacaaaataaaaagtgccagatcgtgaatccgtcgattcatgatccaacactaggttagtatgtttcttttaccgatttttacttttccgtatttctccttcaaaaagagcggtcaattttgccaaactcttatgatcaggatagcgttgaactaattgctcaattttatcggtagctaatttttttacttcttcggctgagcccattttctctaaaaaatctgccaaatcacctgaacgagcaagtaacttacgctcactacgactttctgccagaaaagcttgatcaaccttacgtaacttcaaactaccatctgcattaaagtgatatcctccccacatatgctgcttaattggttgcatcggttcgctatccacataacacaatttccctaccatatggtgcgtctcagtaattcctaacgtaaccgggtcataaatatcgacatagttaaaaattttctcccgcattttagccacctgacgtcgttcagctggcgtcagtaaaagccaaatattggttccttcatacagataaacagctgcaattgcttctggatgacgacaattagctaaagcaaactgagcattaattgaacctaacgaatgaccataaatataaattctactacctttaaattgattaattgtctgattcaataagtgagcagctgattttaattggctaggaatcgtccgttttcgtgcaagcagtgcttttaaaattggtagattagttttaatccattcatcacgccaagtttgtggagtcccctttttaaaaccatatgatcctttaaataagattgttatttcattcggacttgaaatgacgaaggctcgcatcccatccttagcataaacattacgacaaacagttccaagataatgttgatctattttgatagtatcacccagctgcaattcatcatatgcctttttagttaattcaactcgttcacgatctgttaactgtgcatttacactcataattttccctaaaataaaaaactaactcttactattatgttagcatgagttagtttttttggataatttgagcctttaatcatattttttctgcaagtaatttgcaatcgttgacaagcagaaacagacaataaagtacatgattgcaataatcacatacattggaattaagtaagtcgtgttctgactgtaaataatttgtgcgtggtataaaagctctggcaaaacaatgatagttgccaatgaagtatccttaaccaatgatacaaattgtgataataatgccggaatcatattgtgcaaagcttgtggcataattacatgatacatagcctgaccatacgacatcccgttggaacgggcaccttccatttgacccgaatcaactgagccaattcctgaacgaacaatttctgctagcattgcaccttcaaagatgactaacgctgcaattgaagctgtcgttggattcgttacaatacctaattgaggtaaaccaaaataggtaaagaagatgatcaacaatagcggcaagtttcgaataatatcaataataaagcctacaattgcagacacatacttaattttcatgtagcgaactaatcctaagattaatcctactacgaagcttaatgcaattgaaattaatgaaacataaatcgttacccaaagtccttgtaataagaagcggatatcgacccatgaatatgcatgaataaaagtttccattctctatccctttcctattagttgactaattttttctctaaatgacgcatgtagtaactaagcggcaaagtcaagatcaagtagaacaatccaacaataatataagtatcaattgtttggaacgttgagaacgcaatcaattgtgcttgatacatcaagtcaaaaccggcaacaaaggccaaaactgaagagtttttaaccaagttgacaaactggttgcctagtggtggaatcactatcttcatcgcttgaggtaagatgacataacgcatggcttgcacataggtcataccgttggagcgagcaccttccatttgaccagttccaattgaattaattcccgcacgaacggtctctgcaataaacgctgatgtataaagcgttaaaccaattgtccccgcttgaaatcctgacaatttcacaatataacgtggaacgatcaaataaaagatcatgacaattaccagcaaaggtatatttctaaaaatcgcaatatagatcttcgcgatcacttggccaaatttagatggtgctacctcaagcaaggcaaaaatcacgcctaaaatcaaactgaaaactagagcaataatactacttaaaatagtattccaaaaacctgttaggaagctgccccagttgttagtaataatttgccacattatttcaaaaccccctttagactaaaaccaggaattccagcaaaccactttttaatcaaacggtcataagtaccattcttttgtaattcattcaaagcttggtcgatatgatcagccatttgtttttgtcccttattaacagcaattccgtaaggagcattactatagacgccgccgactaacttataaccaggattttcttgagcgataccggcaagcaaaccgttgtcagtagttaatgccacaccttggttagccttcaatgcagacattgcttgaccatagtcatcatattgcaaaatccgcgctttaggggcatacttatgtacatcatcaactgcggtagttcctttaacggccaaaacagttttgccttccagatccttaacattcttgatcttactattattaggcactaacaaagatgaaccggctggaaagtatggcttagagaaggttacttgcttggcacgttctggtgtaatagtcattgtggctaaaacagcatcaacatttccattttttaaaagtgggattctagtgttggcagtagtagtaacaaaatcggttttagcatctttatctagcatttgcttagttaaagccttagccaaatcgatttcaaacccttcaatatgtcctgtcttaatgttcgttaagccaaacaatctagtatctgctctaacgccccaaacaattgtcttactttcttttaccttttgataaacattattgctagcatgcttgccacaagctgttaaggtaaacgctaatagaatcagcaaaggcaagaaaagaaatctttttatctttttcatggcgtgtcaccttaatctttagaaataactttgcttaaaaattgccgagcacgttcagtatctggatgagcaaagaattcttctggcttgcgatcttctaaaatatgaccattatcaaagaaaattaagcgattgcttacttctctagcaaaacccatctcgtgggtaaccacaaccatagtaatgccttgttcagcaacatatctcataacttctaaaacatcttcaatcatttctgggtcaagggcactagttggttcatcaaataaaatcaccttagggtgcattgctaatgatctagcaatcgctactctttgtttttgtccaccagataattgacgaggataagagtcaattttatcggccatacctactttttcaagatattgcatcgctactttacggttctcatcatcaggacgctttagcacaatcttaggcgccagcataacgttctctaacacagtgtgattattgtagagattaaagtgttggaataccatcccaacatttttacgaatcttattaatatcggtctttttatcagccaaatcatacccagttacaattaattgaccgctattaattggttccaagccattcatagttctaattaaagtactcttacctgaaccagatggaccaataattgaaaccacttggccttcatcaatctttaagttaatatctttcaatgcatggagctttccgtagtacttatcaacatgcttaaattcaataattgctgtcatggcttctacctttctttcctttgtctacacaatataattattttactcttcttaaagctaaaactaaatattttagcaattcaaaatagtataatagcctgctaatcttataaatttattcggttttagcaaaatatatttgtatttagctagattaaaataatcatattaacgctacttacgaatttattaactactaacttttaggataaagaaaaagtccctcatccctaaactgggacgaaagacttctttccgcggtaccacccacattgcctattagatatagacctactcatgaagcactatcatgcttcaccggtgtggtaacgtaccggagacgtctcaacctactctaagaattgttatttcggtgagctgctaaaagtgtttttcaatagttcagggtctattggcttttcactagcaccaactcactgttagaaataaactatctacttgtctttttcatagccttttaatttatttatatgtatttaaccttattttgggataaaaagcaagcaaaatttcttatacttcaaaatgaatccgtttttaatacaaataaatgctgttaatattcggaaaatagcttaaaatatttagtgatatattgaaaaacaaaggagtttgaaatgggaaaacttgaaaaacccgttatcattggaattgccggtggttctggaagcggcaaaactatcatcgctcatgaaattgcggataatattaatgatcaagatcgcattatgatcatgacccaggattcttattataaagataatactggtgtatcaatggaagaaagaatgaaaattaattatgatcatcctgatgcttttgatatgccgctacttgaggcacaattaagtcagttaatgcacagaaaaccgattgaaatgccaacttatgattttaccgctcatactagaagcgatgaaactattcatgttgagccggccgatattattatcttagaaggaattttagtcctcttcaatgaagatattcgcaatttgatggatattaaagtttatgttgataccgatgatgatatccgttttattcgccgacttgagcgcgatatgaaggaacgtggtcgttcacttgactctgttattaatcaatatttgggtacagttaagccaatgtacaaccaatttattgaactaaccaagcgctatgccgatatcatcgtacctgaaggtggggaaaatgatgttgcaattgacatgttaactactaagttacaatctgttttgaaataagcagcaaaagacctgataatcacaaagcgaagattatcaggtcttttctttattctaaattatcttaattttgattatcatcttgtgcattagctgtgtccaaaattcggttatacttcttggcaaagaagaccaaaagcaagacactagcaataacataaattaccgctgcaatgtaataggcatttgcataaccatcttgggtagtaaataagtaaaattcggtgaagagtccatcaatgacaccgacaacagcataagcaatctgaaccacaccggtaaaggctggacgcaagtccttatcaacaataaccatctgaacttcttgttgaattggcattgtggcattggctaatcctgttcttaagaagagcaaaagaccgacaattacaaacaaaactgtcccgctacctaagcgacgaccgttagctagcaacaacataactggcacacaggtcaatgtacctgcagcaacagaaacaatcgcccccatcttcttttccaagaatggcgcaaagaaatatccaattagcatcgctgcttgaacaaaggtgttaatggtagaagtaacatcacgtggaatgtgcaaataactattcaaataaatcggcacataaacagcaactaaacgagcaccaagttgaataccggcaatatagacaatccacatcaatgtcttcttgctcaaaagctttttatacatagccatcttctctgctctgctaggctccttgtcatctgcagtagaacgataatcacgtggcacatcatgaataaacaaagccaaaacaaaggctaacatggttacggcagccgtaatgtaaagcaggattctgtatgaatttgtataatctgctaaagtttgaccagttaacatctctgacttaccagaaagaacagatgcctcatgataaggaatgcctctaatcaaaccaaagaaccaaacgacagctttcccacctaaaaacgtacagatcgtttgtgtaatcaaattaacaatcattactgttgagaacatcttagttctaatttttcccggaacatatgaggtccacattaatggatacatcaaatcataaaccccaattgctgtccaagaaatagtataagcaatcatgataacgagctggttagtcgtgatacaagttaaagccataaaaatcgcagtcattggcggcaaaatcaataaaatcttgcgataaccccacttgtgaactgtagcgatcattactgacatcaaaatagcagttgccgcattaaaaatgtttaatccagaaatcaggtgtggcgctacaattttgtaataagatagagccgcatcattcgtaatcccagttactgcacccaaaatgccgtagatccataaataaataataacattatgtttgtaacgcggattccagttcttaattgcttctgcctcagcttccttttctgcattacttcgtcgagccatataaatcccctttttttgaaaacgcatacaatacatctaactttattctatcactcaaatggtattaataaagtgtgtgtatacgaaaaggtatggtttatagtttctaggcaactttaggttttaatgctttatcgaaaagattggtaatcaatttcactaggacaccatcaaacagtaatgatgaaatcatacttacaataaacatcaacatttgtacattaacctgataatgactccaaccaaacaaaaagtaacttggtataaaaccacctaaattggcaaagaaagcaccagtcaaaacgctcttccatgagaacttttcatagcgttcttttttagggaaaaagccgatctcgttcattgctccttgaattaacccctcaaaaatagtcaaggctccccactggccaccgatcgccatctcaaccgtggcagccagcaattcaccaatagttccagctcccttagttggtacaaaatacatcgctaaaggagcagccatataccataagccagtaaaaacgttgtcaacaaccggtgcataaccggtgggtaaaaagcttaattttactaagttatacacattgttaaagccataagtgtaaatcacacccatgatgatcccgattaaggcaactaaaataactgattttacattccattttgacgatctagtaaacataaaaaatgctccttactaacatactgtcagtaggagcacacaaataaaagttaattctcttgttagcactttcccttgcgcaagtattatcttgttcaggttcgaagggtattatctcagcattacgcacccctagtgacatttcatttatttatcaattaagtcaagtatagcacattgttaatcaaatgccatttgatctgtgtaaagtttgtaataaaatcccttttctttaagcagtgcctcgtggctgccttcttcgatcacattaccatcttttaacacaacaatcttattagaattcaagatcgtctttaaccggtgagcaatcacaaagcttgttcgtccagcaatcacagtatccattgccttttgaatcttttcttctgttaccgtatctacgttagaagttgcttcatccaagattaggaatggtggattcgttaaaattgtccgagcaattgacattaattgcttttgcccagttgaaaagattgagctagcatcgctaacttgagtatcgtaaccatcaggcaaagtctcaataaaatcatggatattagcctgcttagccgctgaaatcacttcatccattgaagcattcggcttaccataacgaatattgtccgctacagtaccagtaaataagacagagtcctgcaggacgatcccaacattatttcgcaatgatgttagttgaatatcacgtacatctgtcccgtcaaaggttactttacctgaattaacatcatagaagcgatttaacaggttcataatcgtagttttacctgaaccggttggtccgaccagagccactgattggcccttatcaaccgaaatatttactccgtgcaaaatttctttatctttattgtagccaaaatgaacattttctagcttgacaccatgattcaaaccactaatgaccttaccatttggcacttcgttttcatctttttgttcttcaactgtagctaatcttcttgccccagttaaagctaattgaatcatggaataaattgaagtaatttgtgtcaaaggttggaaataaacttgtgaatattcaacgaaagttacaatcaagcccaatccaatagcctgagaaatttgaccggaaataatcatccaagaccccatagcgatgacaattgccaaattaagtaagttcaatccgttcatcaatgggaataggattcccgaataaaattgccccttaaacaaaacggttcttactttattgttgtagaccttgaagccatcaaccgattcttgacgcaaaccattggtaataatcaccttttcaccattgatctgttcggtaatataaccatttaaatcgccaatttcatcttgctgcttatcgatataaacgcgagcttttttcattaaaaggacactaataatcaaaatgaatggtgttgtcgcaatcgtagtccaagccaaagtactattaatcgtgaacatcacaataattgttcccacgaacataattccctgggaaataatttcaaaaatcgcattgttcattgcgttgaaaatattatccaaatcggaagtaaatagcgataaaagtttaccatcctgatgagtatcaaagtagcgcactaacatccgttgaaacttggcaaatagattctcacgcatgtcattagttgaatccgcattgaacttggacattaccatccaagcaataaaaatcgctatctggctcaataagtaaaacaagaacatcgaccataacgcgctatagaacgtgttcatggatgctgtacccttttttaaatcaaccaaataagtagttaaagcggtaactgaacggcctaaatatgtaggtgccataacctgtgcaccactcgaaatcaaagaaaggataaccacaatagtgattcccttccaataaggcttcaaatacttagcaaaatagcgcaatgcctttttcgtattactcatttattcatttcctcctttcttacctttttgtgtcttgaagatttcttggtaaaccggcgaagtcttaagcaattcttcatgcgtaccttgtgccactaatttaccgtcatctaacactaaaattgtatcggcattaatcactgaaacaatcttttccgcaatgataaaagtagtagtatcaggcagctcatgctctaaagcttgctgtactttcttctcactttccgcatccagagcagaagttgaatcgtccaaaatcaaaattggtgctttagcaatcaagccacgtgcaatagatagacgttgcttttgcccaccggaaaagttagcagaacgctcctctacttcatgatcgaaagaatcgttataacgctcaataaattctgatgcttgcgccatattggcagcacgctgcaattcatgtaatttagcctgagcattaccttgacgcaaattagatgctattgtacctgagaaaagaactgctcgctgcagcacaaaagaaacagttttgcgtaatgcagcttcagttacatccttaatattttgaccgccaatttttacttcacccttagttggatcatataaacgagcaattaattgggccaaagttgatttaccagcacctgttgccccaacgataccaaccatttgacctggcttaatcttaaacgaaatatcctttaaagtaggatcatccccatcaggataagtaaaggaaacatgatcaaactctacgctaccgctaagaggtgcaaccgaaccactttccacaaacttgacatctggttcagtctccaatacctcacgaatacgtccaagagaaatattagctcttgaaaattgcattaaggtcattccggcaatcatgatcgtaaatagcagggttaaaacatagttcacgaatggactgactaccgcaatatcacttggatgtgccgtaatatttttaccaattaaataaacaattaaagcaattacggtataagcgatcatctgaaaagctggcataattgcagagaaccagtaaccaatcacaatgttgtagtcattcaattggtccgaagtttgatcaaactttttaatttcttgtggaccttgattaaatgacttaaccactctcacaccttgcaatgtttcttgtgcttgattagaaattcggtccatcatttcttggaatttggtaaacaaactattcatttgtcttaaaacgtaagcgccaaaaccaaaaataagtgcaaccatgaccactggtgcccaccagaagcgcggaataatcaggatacagaagataaatgaaccgacaattaaaatcggcaaccgcaacatctgcataaatagctgcatcatcatgttcattacctggttcatatcgttgatcaaccgtgtagttagagaacctgctgaaaatttcttaatattaccaaaagagaacgtttgaatcttagcataggtatcttcacgtagatcactaactactccttgtgcaattttcgctgcaaaataaacgttaaaaatacccgaaataattgcaattatacctaggactactagccagattccatcagacaagactgcttgcttctgattcgccatcaatgccttttgaatattttccaataatttaggctgatataatccagaaaacgctgaaactaagatagcaataattgcacaaacaacatcttttttataacgctttaagtatggaagaattattttaaagttttccatttttactcctttcttcacttaaaaaatgccaaaaagtagtgctccattcttctgaaagcttagctaacaatttcattttgtcagttcccatggcttgagccgttttttcctctaactcaaatagaggacgcaacctgtcataagcatatttccgccctgcttcggtaagctggcaaaatcgaactcgcttatcgctaggatcaacagtcatcgtgatatgatcatgatcacgcagaatcttaattcctttgttaatcgactgcttgggtaaatcactcagatttactaattctctttgtgtcaattttccccgaatcagtaattcatacatgattaccactaaatagtccggcaagtcatgatcctgctcccattggctataagcacggctgccatggataattgatagatttaatttttctgtctcactaattttcattacttcaccaccatatttagtctacatgcatgccaaatatattagtatgcacatggactactaagtgtataattttttacggtaagttgaataaataattaaaaaagcccaagtcctttgaatttggacttgagctcaaacaaaaagaccagtagtctgatgttaagaacaaaaaacacattagaagctggtcttttatgaattcaattgtaactgaaatcgcaaatattataaagtctgaagataattatattaagcgtgaaagaaaaataatctgtttcttcttaaacctgattaaggaaatcatggccttggctttagctaaagttgatgatgaaatgattaccaaggttaaagcacagggctatcagattgataagaagaatgagcgctcaatcaatatggcttttggcgaagttaggtatgtcagaagaagatatgtctgcccaggcaaacaagcaaggtatcccttggatgaattaatgggctttgacaaatacaagcgctacagtattttagcagtcaaaaacatcttagaagtaagcagcgttgccacttatcgcaatactgctctagcagtcaattgcctgtctggctttaatattagccatatgcaggtgggcaatttggtaaaaatggccgggaaaaatattaaagcgggccaagaagcagattcaagatatgatgccgcaggcactaagaaaaaggtcccagttttgtatcttgaaggcgatggcgtggtgatcaaaggcactaaaagccggttggaatttcatcgctatcaggtctgtgaaggcattgtcaatataagcaagaaacgcagaaagcgaatcaatgccaaggaatttgtttctttaagccgacttgatgcgctgaacgaagccaaggagtacctggccaatacttatgatctttctgatactgtaattcttagcaacgccgatggcggtgctggatatgccaaaacagacttcgatgacattgtagggctatgcaagcgtcatgagcatttcttggatgtctttcacctaaataagaaaatcaaagaaaggctatattttgcgcctgacctgcaaggcaagctgatttctgctttggaatacaaatacagctatgacaaagttaaaactatcctaaccactgcagaaagccgactaattgatgaattgaataccgagctcaatcatgattatctggggcgcctaaggaattatattgatcgtcattgggacgatattaagccgtttaagaaacgaaaactgactgtgactaaagccattggctgctgcgagagcaaccaccgcaagtatacctaccgtgttaaggggcaaggcaagaaatggtcaaaatctggagcagaaggcatgcttaggatcttaagctgcatcaagaatcgagagctggaattttggcttagcagcgagtttgaagattcagaaataactgtattgactgaacaggaattaaaagcagcggcccgtgacagcttaaagaagcgtcatgaagttcatttaggcatccagcatggcgcattaaccgcacaggtagctggcaatagttatttaagcaagctaagcagaaatttaagtcatataaatatttaagaaattaaggttagactaatggtttaaaggctaccgcaaaaacattgacacttaccatggactattgtcaaatcattttgtcaaaaataagactataattaaagtaaagaaacaatttttgcatctaaatttcaaattggtataataaaaaaatcatcaagtaaaacaaggcagggattatatgcgtaaaaagtttttattaataatttcaatagtggtcctgtttgctttgccattaagtggctgtaagcaaaacaaaaagcaaaacgtttatcaagcagttaaaactagtaaaaccattaactggggcgtcaaagccgacacgccattattcggctcaataaatattaaaacaggcaaacttaatggctttgaaattgatttagctaatgcattaacccatgaaatgctaggcaaaaatgccaaagccaatttcataacaacaacggccaacaccaagattcagcttctaaaaaacacgaatgttgacgccgtcattgcagcaatgaccattacgcctgaacgtaaaaaacaagtcgaattcagtcacccttactttcctgctggacagtcaattatggttgctgacagtagcgccattaaaaatgctaaaaatttgaataacaagaaagtgcttgtagttaaaggaactactgccgccgatgctatccatcaagttgctcctaaagcggaaattttacaattcgatgattacggccaagcttttgccgcattaaaagctggacaaggagatgcctttgtaactgataacggaattttagctgggattttgcgtgatagttccggctataaattagttggcggcacctttaccaaccagccatatggtattgcagttaataaggggcaaaatgacatgctcaagcatatcaacactgcattagcaaaactagaaaagaatggcacatataatcacctagttaaaaaatggtttggcaacattcctggtatgaacattaaagaactagaaaagaaataagaaaaaggctaagatcaaaattttgatcctagccttttcgcttatttagcaatgaaatcaagtaaagtaaacattacatctttatttttctcaggcacaccatgattaataatctctgtaggcgtttgatgtaaatcattattttctaaagcatatgctccatcattaatagcaatctcacgcacattatcaatttgcggttcaaagtggaactgcaacccaattacattatctcccagtaaaaagccttgattcttaactagatcactagagaataataacttagcttcggttggaatttcactcatttgttcatgccaatgaagagctgttaacttatccggaattcctgtaatagtctgatcttgcaaataaactggtgcccaacctacttccttagcgggtgcatcaagtaccttatagcccaaagttttagcaatctgctggctaccaaaacaaattcccaagatcggcttgtgttgatctaacatttgtctaatcaacacacgttcatttttgacccaattaagatcatcattaggactgtttggactgcctaggactactaatagatctgtttcatcaacagttggcaaaataccaaaattccctggatggtaaacgaacatttcgttatctctagcatggcaccaggcttgaatagaaccaggtccctcattaggtgcatgctgtaatacattaacgcgcatgaaatccctttctcactcaacaatatttttgtttttcattttatactcaattctagtggtaaacaagaagaattcagttaatcttttactgtatctttagaaactatatgtcaccttatatgatataatgttatacatatttttacatctggaggacttttatggacaatcaccttaaacgcagtattggcttaggttctgcactttcaattatcgttggaaccattatcggttctggaattttctttaaacaagcttcagttttagatagcgcaggctcaacctttatggcacttttagcatggattttagctgggattatcacattaaccgccggcttaacgattgcggaaatcggtgcccagatgccttatactggtggactttacgtctatattgaaaaaatttacggccgcgttttaggttttatggctggttggatgcaggctattgtgtacggtcctgctatgatagctgcagttaccggttttttaagtattatggtgactaatctctttggcatcggcaccgaatggcgtattcccattggtttgatcactatcatcgctatcggcggtttaaactttttagaaaataaagtcggtgcagcctttgctataatcactacaattgctaagatgagccctatttttgcaattatcttctgcggcatctgctggggtgagcaaaacgctgtcgcccaaactgtgactgagctgaatcgatcaacaggtggtcttggcgtagccgttctcgctgccctttttgcctatgacggttggatctttattgcaaatttaggtggtgaaattaagaatccacaaaaattattacccaaagcaatcatcattggaatcactacagtattagtaatttatgcgttaattactattggtatttttagtttcatccctgccgataaaattcatgcattaggtcaaaattcaaccacttatttggctgacgctattcttggtccaattggcggtaaagttctatctgtcggcattattatctcaatgctaggcactcttaatggagaaatgctcacctttccccgtgttatttacgctatggctaagcgcggggatttgcctttctcaagatttttatcatacgttacacctaagggaaaagcaccagttatggctactatgctcttaattgccttaactggaattatgatgactttcttcgatcctgattacctatcaaatctctgcgtcttcacaatttatagtttctatgttttagcattctttggcttattcattttaagatacaaaaataaggaccaacgtcctttcagcgtgccattttatcccctaattcctttagtagcaattgcaggcgggctcttcgttttagtcagccaattcttcaatgatcccgctggcgttttgctttttactggaattaccgctgtcggctggccaattttctttttagttaaaaagatgagcaaagcacagaacacgattatcgaagactaaaaatctcaaatttttcttgttcatttttaataattatgatattctaattaaaattaatttaggagattcaattatgatttatcaagacaccacattggcatactcatctagctcaagttccaactgaacttgagtgattttggtgtacgtaaatcagcagccggattcactcaatcgtttctagacgataaggtgaatccggctatttttgtataaaggagaaaaaatggacaacaagcttaaacgcagtattggtttcggctcagctttttcaattgtaatcggaactatcatcggctctggtatcttttttaagcaggcttctgttcttgacagtgcaggttcaactacaatggccttattagcttggatttttggtggtctaattaccttggctgcaggtctcaccattgccgagataggggcgcaaatgccctacactggtggtctttatgtctacattgaaaatctctatggccgcattttagactttatggctggttggatgcagatcatcgtgtacggtcctgcaattattgccgccgttgctggttttatgagcatcatgatgactaacttttttggtttgaatcattcatggcgcattcctttggctttaatcacagttttagcaattggaattatgaatttcttcgaaaataaggtaggtgcaatcttttcggtcattaccacgattgccaaaatgattccgattgctgtaatcatcatttgtggaatctgttggggtcaacaagatgcgattaaccagactgtagcagaggttagtcaacacactagtaacttcggtgttgctgttttagccactttattcggctacgatggctggattttaatcgctattttaggcggcgaaatgaaaaatccccaaaaattattacctcgagcaatcattgcaggaattacagctgttttggctatttataccctaattacaattggggttttccgcttcatccccgctaatcaaattcaccaactaggcgaaaacactactacttatctagctaacgcggttttcggtgcaatcggaggtaaaattctttccattggcatcatcatttcaatgatgggaacattaaatggaaaaatgctgacctttcctagaatcgtttatgccatggctaaacgaggagatctacctttttctaaatacttagcctatgttactcctaaaggaaaatctcccgttgttgctactttgtttatcgtccttttagcccttttaatgatgattttctttgatccagaccacttatcagatctttgcgtctttacagtttattgcttctatcttttagccttctttggaatttttatcctaagaaaaaagaataaagcagagcgtcctttcagtactccactttatccttttgtgcctataattgctattttaggcggtttgtttgtcttaatcagtgaattaattaatgatccagctggtgttttactttttgctggaattgtcattattggattaccaattttttacgccgttaagcgcatgaacaaacatcgtttgcattaaagcgacctttctacactgtagcttgctcgccacaactcttccattttagctaaacgatgccaatcccctttttgacacattgtatataaagcatgtgcaggatcataggcaattggattaccttctgtttccttcaaataagctccaacaatgttgattaacatcatccgaaagcgttcaatttcatttcggctaaagtaagtttcaaaatacttgctggttaagcaatcaaccgttgcttgcgaggccttatgcaaagaagccggattcttacgatagttatataaagtataggttgaaattcctgttgccttacttaaactagtaatcttcacattgcgatcagttaccaatttttctgctctttgtacatcggttaaaattttcggatgcttaatgtgaggaggcatcggaatacgtttgcttaactctgcaattactttttcagcagcttccctcatttgctgagtggctactgtctcacttaccttgtcatcaagcaattctcctacaacgaaagtatgatcagtcacttcataccttctagtaattgcattgtaaaaatggccttcaacccctgtgatcttaactgcatcagttccagctttctcatagtcaaaaaagatgtgttgttgatcaccagttaatggtgaaaatggtaaattatctaacgtaaaaacttgtacatttaaagtataatctgaatgaacggaatcttctgcatcactacgatacattttcacttcccgatcatgaataaaatcttcaaaaataagattttttccatatttttttttcatttcttaatccccttttatatagtcctattatccattataagcaaaaaactagcttttaaaagctagtttttgtttttattagaaaatattcggtttagggcaaataattaccagcagctaagtataaatcgtaccactcttgtctagtcaatcgaatcttggcacctttagcagaatccctaatgtgttgcggattcattgatccaactagcatttgaatatttgcaggatgacgtaaaatccaagctgcagcgatcgcatttttacctacctcatacttatcggccagtttttgcaactcttgattcaacttggggaagccatcattatcaatgaaagtcccttcaaacatgccatactggaatggtgaccaagcctgcacagtaactttgtgtagacgggcataatcaagaaattggctatcacgatcaactgatggtttatctaccatattcatatgcatcccaaagtcaatcattcctgtatgtttcaggctaaattgtaattgattgaacatcaagcgctggctcaagcaactttgtaacaatttaaattgagccgtatcaaaattagatacgccgaaaaagcgcaccttacctgctgcctgtagttgatcaaaagcctcagctacttcttctggatccatcaatgcatctggtcggtgaagtactaatgaatcaagataatctagttgcattctttccaaaatttcatcaacactatgcaaaatatgttctttagaaaaatcataacgttttcctggaacaattcctgttttagattgaataaacatctcttcacgcttgatctgcatttggctaaaagcttgaccaaaaatctcttctgattttccaccgccataaatatcagcagaatcaatgaagttgatcccagcatcataggcggcttgaattgccacttgagcctctggaactgatttttgattcattcgcataatgccaagtgccatcgctggaatgcttaaagtagtacatcccattttaattcgtttcataatgtaagtcctttcattctttatttacctcacatcatgaaccaaaaatagctaagtttcaaccacaagaaattcaataatcttttattaatatatcttagctactgccgattgaattgattctttatctaagaattcgtcataacttgtatcttggcgactaacaatacctttaggtccaacttcgataatgtggttagcaatagtttgaataaattcatgatcatgtgaggtgaataaaattgaacctggatatgaaacaagggcatcatttaatgcagtgattgactcaagatctaaatgattagtaggatcatccatgatcaatacattagccggttcaagcatcatacgtgacaattgacaacgaaccttttccccaccagaaagtactttgatcttcttctcaatttcttctccactaaagagcattcgacccaagaacccacgcaagaatgtgttatcatcttgttccttagtagcatattgccgtagccaatctaagattgtaagttcatcattattaaagttagcgttcaaatcgcgtgacatgtagttaaaggccgttgtttgaccccatgtaacggtaccagtatctggcttaagcttaccagcaacgatatcaagcagcgcagtcgttgctaaagcgttacgtgataaaaatgctaccttatcaccaggacgaacaataaaggaaacattatctagaattttttcaccatcaactgaataagaaacattttctaccttaactaggtcattacctaaatcacggtgcatttcaaactttacaaatggatacttacgactagatggcttaatatcatctaaagtaatcttatcaagttgtttcttacgagaagttgcctgacgtgatttagatgcattagcagaaaagcgggcaataaattcttgcaattgcttcatcttttcttcttttttagcattttggttagcagctaattcattagctagtttgcttgattcataccaaaagtcatagttacccacataaagctgaatcttaccacgatcaacgtcacacatttcagtacatacttgatttaaaaagtgtcggtcgtgggaaacaacaatcacaatgttagggtaatcagccaaaaagtcttctaaccattcaacggtatgaacatccaaaccgttagtcggttcgtccaatagcaaaatatcaggattaccaagcaaagcttgggccaataagaccttaactttttcgctttcaggtaaatccttcatcatcatttgatgttcttcttcaggaatccctaatgattgcagcagcttagccgcatccgcttccgcattccaaccatcaagttctgcgaacttgctctctaattcagctgccttaaccccatcttcatcaccaaagtcaggtttggcataaagagcatctttttctttcattacttgatacagttccttgtgcccttgaattactgtgtccatgacagtgaagtcttcgaaagcaaagtggtcctggttcaagctggacatgcgctcattgggatcaattgaaattgaacctgttgttggttccagtttcccctctaacaatttaagaaaagttgacttaccggcaccattggcaccaattacgccgtagcagttgcctggagtaaattttaagttaacgtcttcatagagtgtgcggccaccaaatcgtaaactaacgtcggatactgtaatcaatctctttacctcgcttaaaatataaaattatgtttaagtatatcaaaaaagatggtcccttataatagagaatccatctttttaagcaatttattaaaactttttgaagctatctagcttttcctgggtaatatcacgaataattgcagtagctaaatcaactgaagccttaaagtccttataactactgaaacaatatggtgaatgttcatagcgcactggaataccgatgacaattgttggcgcaccattttcgtagtaaattgcagcaccatcctgaccgccaccggttctaactgaacgagtatatggaatattatttttatcagctaaatcacatgcatattgttggaacttaggatttggtaaaaatgtcgtatccatatcgcgcaacattgggccacgttttagaccagtttgagaaagccagtcaggcgtaaaagtatcatcagctggacagctttcgagtaccagacaaagatctggcttaacttttctagccgttacataggcgccacgcaagccaacttcttcttgactagaaagtgcagccactacgtcaaagttagtttcttcacccttcaaattatcaagcacatcaaccatcgcaccagcaccaaaacgatcatcaaagtctttaccgaagaataaaccggacttttcatgatattcgcatttaacatcaacaaagatagggcaacctgtatcaatcttgtagtccttgattgtctcctcacggctagaagaaccaacatcaattgacatatctgccacatcaggtacattattgcgctcagctgctgtcatgaagtgaggcggcttagttgctacaacgccagggatatattctccatcacgattgcgcactttaacgcgcaaggctggaatattatattttacccaaccaccaagtggaacaaacttaattaaaccattagggcgaacagcttgcgtaatgaagcctacagcatctgagtgcgcatcaagttgaattaccggtcgatttcccttattttctttcttggcggcataaacattgaacatcccatctacctcaatatctgccgttttttccgcataactagtaaacagcttaacgaattcttcctcaaagcccgaagtcgaattggcatctgagaattctttcaacatttggatttcttgttctttttgcataatttttcctttctataaaaaacgcttaatttaattttaccgagaaaaacagtcaaagtagactataattaaaaataattattgcaaaggaaaaataaaatatgaaaaataaattttcaatgataattcttttacccctgctttttagcctatcagcctgttccaaccgttctagtcgtcccgctacggttaagcagttctgcgacacataaggcatccaaacaggcaaatgagtttaagcctgatttaaaaaagaaatatcctggctttaagttaaccagtatccctgaacaatttcgcggtacctggtatcgtagcgatccactgagtaaatcagttcgcaaattaattatcagcaagcagacaattggtgactcagtagtttatcgacaagtggataagtccattaaactagatcataattctgagcaaaagaataaaacctattctggtggtgattccatgatcgccatcgaacaacatcaagggcagacttggatgcgcgttcgtgagtttttaacaactgtagatattatttatattactggtcaatttaaaggacatccttgtttatatcttgcatattcttccggagatatccacaacgcacttttcaaaaacaaagcactagcaattaagtataaaaactatgacttttctaaaattaaatcatgaaagatattaacaatctactacaacaaaaaagtaacttactcttaaaaattagctcgttacccttaaacctattcccttatttagtattcagcttaattattaaacaaaatactgcaatcagcgtgctgccttttgcactcttctatgcctttcggcgcacaacattgtttttatttaaaggcggcgaaaatgaagataatgttattggctggttcggtttattggcagctttattaggctatttcttagggattttcggcatctttttaccagccctttactgcattagcgcatcccttgccggaataggcgccgcatgtttccctagcgttcaaaaacaaatcgccattcaaagcgactatcatccaagcaagaatgatctttttgcttattttggggcaattttaattttactagcaatagttgtctttgttgaaccacatctgccaacaatttcatttatcgcaatgctcatttatacgctaattgctatactcggctttaaatattctccatttagagcacattcacgggaaattgtattgcagtggcaaaatgtctggttaactcttggtttgctactggctattctcttaattcgagaaggttggaactcgggaaaagacatcttctctatttttggcattatcgtttcagcagtagtcattattaactatctgatcaaattagctttaagccaaaaacatggtaaattatctcgcaaaatgcagtatcgcctgacaatcgcaggcctctgccaagactttaccactatcttttcagccgtttatatttctgttttatttggtgcaaaaaattactactggttatttgtcattatcttaatcgccagctttatcaaacgtccattattaaaaacgctacgtgaatatttaccatttgatgacttcaccattcaaagttggggcattgttctcggtctagttattacgctctttaggccaacatactttgcagggatttttttgattcgaattttctacagtttacaaaatactgacaccttagatcttatccgtgatcatgtcgatacaaatatttatatgatcaactatcgttttcgcactgctggaggcttcttaactcaattaattctgtggggtggcttgcttttattcaatggaccgcacatctttgagcaaatctttaactaccatattaataaaagcgttatgaattctagtcagcccttatttttaactcaattaatcttggtgctattcataatcagctttacaatttatactttaaaacttaacaaagggaataaaaatgaatgaaaaacctatttggaaaaagaatttacttgtcttatctattgcggtctttatcgctggtatcgccttctctgaagtaatgccgtttctgccattatatattgatacactaggcaattttacccataagcagttaaacttttggtctggctttatctactccggtacttattttgtatcggcgataatttctccctggtggggaaaactagcagacaaaaaaggcagaaagccgatgacattacgagcttcattgggaatggctatcgtccttggctgtatggggctagttaccaacgtttatcaattatttattttaagaatgttacaaggtatttttgcaggctttgtttctaattccaatgctctagttgcgactgaaactccgaaggaaaaatctggacaagcacttggcactatggcgtctagctttactgctggcaacttactcgggccatttattggtggagccttagcgtctattttctcctatcgcgttaccttctttattacaggtggtctattattaattgcatttcttttgtcattgttctttgtccatgaaacagacttcaagccagtaactgaaaagaaacttgataaagcaagcggagtaattaaagaattacgctcaccgcaattaatctttggcttgcttttaactactctaattattcaagctgcaaataattcgattaacccgatcgtttcactctatgttaaacaattgatggctaaccacggtaatgtcgtctttatttccggggtaatagctgctttgccaggaattgctacattccttgcggcatcgcgcttcggtgcactcggtgaccgcattggaactcataaaattattattgctggctttattggagccacaatcctcttctttttgactgcttttgtacaaaatactgttgaacttggtattttacgctttttagtcggctttactgatgcttgcttgttccctcaagtgcagactttgcttactaaaaatacgccagcaaaaatcacggggcgaattttttcttggaatcagtcagctatgtatatcggtaatatttttggaccgctactaggttcaactatctcaggattaactaattacagcactgtctttatcgttactgctgggattgttgtctttaatttgattttgtttagatttaatgtgattaaaaatttgcagtaaaaaaagtgtttgagtttttctcaaacacttttttctattccgcagctttctttgcttcatgatgattataaataaagtttgcaacatacccacaaataattagcaacaacgatacaatcataatttctctaattccggtatgaaaaattgtccgcattgttggcattaacgccttaggcaaactcttcgcagattctgcgtcactcaacttattcatcatggtcatcgtaatattgtggtgtccagcaattccacgtgctagagctaaattcataatcaccccataaacggcagccataatagtttgcgctaaaattctaatcaaaaaactaagcgatgtagcaggtgccatatccttttcaccagcgtcaatctgcacttttatttgaagaataacgaagattgagcctacacctaaaccagataacgctgcaatcgacatcaaaatctgatatggcgtactaatcggtacaataattaaaccgattactgttattgcaatcaatgtaaaatcgaaaattaacaaatgataattattaaaatgtctgagtaaatgcggcgtactttgtgaaccagcaatatcaaagattgagttaggaatcaacgtcatcccaccgattaaggccgttgtccctaagattgcctgcgaccacattggcaaataagtgttaactgcaatatatgcaccccaggcaaaggcaaaaagaatgaaatcaccaactaaagctttattagtaaaaaccgataatggcacgataggactagcagcttttttctcaactaagatgaaccagacaagcattacgatcccgataatcacgaaaatagccactagaaaattactagctagtcctaacatctgaattccaatcaaaaagcaagtcaaaccgccaattagggtaaaagcacctagtcggtcaaagacagtattgatgtttggcttgcgaatgccacgataaaaaagaaaactcaagataattgatatcaatcctaatggaacattgatataaaagacccagtgccaggacaaagcatcaacaatccagccaccaactagtggaccagcaatacaagcggccgaaaaactagctgcaatataactcaagatgaccgtcctgcgtttgatattcggataaatatagccaacaatcacataaggaagagaacccattccaccagcaccaacgcccatcagcactcgagaaataaggaaaaagtaaatatcaggagcaaccccttctaaaactgaacctaaaataaataaggctagtgacaattcgaaggcaaatttgttacccattctttcaccaattttactccaaattggcactgagaccgacattcccagtaaaaaacaggcaacaatccaacccatatactgaattccgtgtagatcggacacaattgctggaatcgccgtattaataattgtcgcatctagccctgacataatattagccagcaacaaagacaaagtaaccattgatatttgcttcttagtcatttaatcccacctttttaactctaaaaactactattactcatagtatgcaagatttaactagcaaaataaagcacaatatttttcccctgaattgtcaaattaagtgcaacagttaggctatgaggaaatatattgcttgaagagttcttctgctgtgtgatattggaggattcggcgatatttgtggttaatggcatcagttgcctgttgaacataagcttttgacttgtctttcatgctcttgcccttagggaagaattgacgcaaaagaccattgcagttctcattggtgcccctttcccatggagaatatgggtgagcaaagtaaatctggcagcccttgatcttggtcatatccgcaaactcagagccattgtcaaacgtgattgatttaaaccaggcaggatgtctgtcaatctccttttgaagcagcctttggcatgtgcttgcccgatagtcaggaatcttgataactacttcaaagcgtgtggttctttcagtcaaagtcattaaagcaggctgattcttgcgtctgacgcctttaaccagatctccttcccagtgcagcggagcttttctgtcttcaatctctttaggacgctgttcaatggaattgccaagatgcttcttgtgcaaagcgtgaccgccatggctgtgatgacgcttgttcctgcgtcttttgagcttcataggcagatcaatattgcttatgtccagcaagccctgatcaatatagcgatagacagttggtgtgctgggacaagggtagcctggcatagtccttttgaattcaccaacgaactcatcgatgctggtggcatcaaatttagctttaaagcgtctggagagcattctcaaaaagacagcataatgcttcaatggattgcgctgatagcagtttttgcgacgcttctcataataaatctgtgcagtatcagcgtaatagtgctcatacaataaatagctgctgtctctttgcaggacacttccgcgtttgatttcgcgactgattgtcgacttatggcagccgacttcttgagcgataacagtacgggaagttatgccggaatccagcattgcttgaatttgtccacgttgtacgctggttaattgatgatagtgcttagaaatgctagaatttgaattggtcataaagatcttcctttcttgatttttcgtcacttcaagtttaggtcttcatggcctttttgtttaacacttagtgttgcacttcaattttaaatccgggacaatatttttccactaaatcttgacaatctgtgtttttccgagttaaatataaagaaaataatagtgatgacctttaaagttagtcccgtgaggctaagaaggaaatctgcacaagctaatactttttgtcgttagctaatacagaaggaccatcttgagccatgagctcttggtggtctttttcttttggtcatccagaaaggaaaaactatggcaaaagaaataatcgatgctttaagcatgaaacgcgccttgatgcgaatgacctacgaaattgtcgaacgcaataaaggtactaaagatcttgtattagtcggaattaaaactcgcggctggtacttggccgagcgaatcgccaaaaatttgaaaaacttggaagatgttgaagtccctgtaggggcaattgacatttctcaataccgcgatgatttaccagaggctgagaaggaaaagatgatccacagccaacaacttgacttcgatatcaccgataaaaacgttatcttagttgacgacgttcttttcacaggtcggacaattagagctgcacttgatgcattaatggatcaaggccgtccagctaagattaatttagctgtcctagttgaccgcggtcatcgtgaattgccagttcgtcctgactttattggaaagaatatcccaacggcaatgaacgagaaggtcaaagttgcaatgactgaagtcgatgataaagatagtatcgaaatcgttaaataggagttttttgaatgaataaaaaagaaaagtacagaaatccggaggccgttttagacgtctatgaaaagccggaattcggccaaggcgtactgctatccttacagcatatgtttgctatgtttggttctaccgttttagtgccaattttaattggaattaacccaagcatcgctctactttcatcaggaatcggtaccttggtccacatgctcttgacccacttcaagattccagcatacctcggatcaagttttgccttcgttgctacaatgcaagccttaatgaaggctgatggctacccggcagttgcccagggtgcgatcgcttctggtttagtttacgtagttgttgcgatcatcattagcaaaattggttcaggctgggttaacaaagttttaccaccaatcgtagttggaccaatcatcatcgttattggtttgtcactagcaactactgccgctaatgacgctatgatgaataattctaagtatgatttgacttacttcggtgtagctatcttcactttggtcatgactttagttttccaaatgtgcttcaaaggcttcaccagtttggtttcaattatgctaggaattatctgtggctatatcttatcctgctgcctcggaattgttgatttctctggcgtggaaaaagcagcttggttcacattgccagcacttgatgtgcctggaatcagctaccatttcaaatggtaccctgccgctattttagccatggcaccaatcgccttcgttacaatgacggagcacatgggccatattatggtattgaattcattaactaaacgtgactttttcaagaatcctggcttacacagaacgatgatgggtgatggtctttcaacgattatcgctggtttcattggtggtcctcctaccacttcatacggtgaaaatatcggtgtgttagctatgactaaagtttactcagtttgggtattagccggtgctgctgtttcagcaattatcttcagctttgtcggtaaacttgctgcattgatcgaatcaattccaatgccagttatcggtgggatttccttcttacttttcggaacaattgcatctaatggtttaaagatcttagttgatgatcaaattgattttggtgaaaagcgcaatatgttgattgcttctgtcatcttggttatcgggattggtggagcttacttacaactgggcaatttccaacttacctcagttgccctttccaccatcatcggaatgcttttaaactggattttgcctaagaaagcagctagtgaaaaagctcaagaagaaaagattaagcaagaaaaacaagaaggtaaaatttaccaatagatagaataagccattcaaaaacccgttagttatcgcaatgatagctagcgggtttatttttcactctcactttgcgcacgcaatgttgtaagttgcgcgaaagttggcgaaagttagtgtaagttacgagagcaatagtatataatttatttacacaaataaatttaagtcatgaggtgacattaaatggactttttaaacttcaaagcaattacacaaactggtaattttaaaacaccatctgaaaatgaaaacatcgaatacaaagaagctagttggaaattacctaaatcattttgggaaactgttagctcttttgctaatactttaggtggaataatagtattaggcatagcagaagataagagtaaacatgaatttagtataactggtgtagacaatgttgaagacattgaaacacaaattttcaatgataataacaatatttcatgccttaatcgacctgtaattcaaaataatgatgttcagatctctgtttttcaaaataaaactattattcaagtaataattcatccagaaccctttaatacccgtccaataactgctttcggtaaagcatatatcagaaccggtgacggagatcgagtaactactaaagagcaacttaaatattttacagttgaaagtcaaaacgaaatcgatactcacttactcccttcgacctatacaatagaagatttagacgcagagaatatcaaagaatatcgcaaaataattgataaaaaaggtattattagcactaattctcaacttagtgatcaagaattcttatattcaattggtgttttcagaaaagatcgattaagtaattcaaatgaatatcatcttacagatggtggtctccttttctttggaaaatatatttcgataacagatcgtttcccacgttttcaattagactatcaacaatataatagcgataattctaccaactggaatgatagagtttctgcaggtgatatgaattaccctactttaaatatcttttctttttacaatttagttttaactaaaatagaagcaaatgttcctgatccttttattcaaggtagtgaccttagtagaacgtcctatcacaacgatctaatcatcgcagctaaggaagccctagtcaattgtttaatgcattcatattatgatggtatggtaggtgtaaaaattgtagatagacctagttactttgaatttacaaaccctggtactatgcgcgtaagtaaagaatcatttttacgtggacaatattcctccattagaaatactgaaatcgctagtttatttagacgaattggtgtctctgaaaccgcagctagtggcggccctagaattcttaatactgtattgcaaaataatttaaatgatcctgaaattaacattgattatgaaatcaatactactcgcattcgtatttttaagacttttgcaattgataatcaggaaaaattaactgaaccagagaaatttattatgtcttttgctagcagaaatcctaatttttcaataaatgatattgttaaagatccgcagaatcattttggtaaacaaaccacgattagaaaatatgtaaattcattagtagagaagcatttactatccaatgagaaaattggcaaaaaatatatctacaatttacagaaaaacaatgattatctaaatcgcgttaaacaccttaaacatcttgaagataatttactcaaatagatcattcaaaaagctcaacctacaaaattatgtagattgagctttttcatcttatttatcttcaaatattctaggcttatcgtcatcaagtgaaacatgcggaatttcggtgttatttgtctcaacttgatcgttctcagacaattctgccttcattaactcacttttggctttactagaagtattgcctaaaagtaaagttttctcctgcggcgtattcaccattgcctgtttttctttgaattttttataaacaaccgccgctactgcaccaatagctccagcaacaccgataattgtgccgattaatctcatctttttcatagggatcacctcgtattttgaaatcactttcttatccttaattatatctaattatgaggttgaacacatttttaatgcctattacctaaaactttccgcaatttctggatccatctcatcttctaaaacgctatacccttgatccaaagtcttgatcagagccatatcgtcatcatctagttcaaaatcaaacacatcaaagttttccgctaatctctccctatgaactgacttaggaattaccacataatttctttgtaaaaaccatctcaacattacctgagcagtagtcttatgatgcttttctgcaatcttttgcaagacaggattagtgaaaatgtggttggctccttccgcaaatggtgcccaggcttcaggttgcacgccctctttttccatatattgctgtgatttccattcttgattccagacattagtctcaatctggttcacagccggctttacatcattaaaagtaatcaaatcagctaagcgttcattccaaaaactacttacaccaattgccctaatgcgtccttccttgtatagccgctctagagcccgccaagtaccatagtagtcgttatatggcttgtgaatcagatacaaatcaatataatctaacttcagctttttcattgaatcgtcaaaggcttgcaaagtctgatcatagccatacttatcgacccagattttagaagtgacgaaaatatcctctcgtgggatgctgctatgcacaagtgcatctccaaccgcctgttcatttccataaatttgggcagtatccacaagtcgatagccaacttctaagccgttttccacaacttgttgagtttgagctaaatcatcaatttgataaacaccaaaacccaagcgaggcattttgacaccattatttaaaattacatagtctttcatatacgcgtggtgctagttaaatcgttctagacaatatgccatattataagctaaaatagctatttctagccgttgttgaaaacctactaagctcctggctcgattattctcagcattgtaatagctaagcaaagaaaagtcgctttcgattgttcttctaattgccattaactgatgatcattatgctttttagcacccctcatgtttttacgatatggtgtccaaagcacgtatcccatacgctttagcttggctgctaagtcttttcctaaatagccttcatctcctaaaagataatggttaattggatgagcattgatcatcaattctaccgtctcttttgcatcatgtaccgacgccttagtaactgcgtagtcaagcagatagccatcatcactcactattgcgtggactttgaagccataatagtagatttttttcgtcgctttataaccaatatcggctatgccacggaagatcttaacgtgataattgcgaacaggctgacaaactggaatcggaaaactgtcgataatcaataattctccacctacctttacttcctgattccaaccctgacggatacaacgaattagaggcaagagcattcgagctcgacggttaaaacgagaatgagataagccaacgaagaatttacagaatcttcgttgagattcaattccaatttcagtttgccaaatgagcatcgctaagatagaactatcaggaagcttggtctgatcaacatttttacgatgtttaagtccatcaggcgcataaagcttatacagcgagcgacaaatcacatttaaccgattaaaactaacttgtaaatggtgagaaaaacgcttaagcttgagatagttcaattagatcagactcttttctatttaaattacttacaacttgagtctagtctaattggacttttttattaactaaaacgatttaactagcaccacgcgttttcatatttcttctcgttttctagttagttcttgctatttaattttattttaacatagcccatgaaatccgactttattttgtgaaacatagatattatttcttaaaattaagtactcaagaaaagcctaaccagcatccctcaacggaattgccagttaggcttcttttatttttcaacttttgcttgataaaatccaaagctcatctgcttcaacattctagtaaaactatcaatgtctagctttttaccggtagtcaaagcttcaaattcaccatcaggatcaaccaatttgcggtcagtcctgtgaaatccatttctttcatagaatttcaggcgactaacacgctgcttataatttttcgccttcttggtaactggctcaatatcaatgacaatttgcttatcagggaatcgatcctctaacatcatcaagatcttggaaccataaccttgtcctcgcaatttttcattaatggctaaataggtcaaatagactgtattatcattctcagcataataagtaatgccgcaaaactgaccatcattataaattgcgtgaaacttaacatttcggtgtaatgacattgctaaaagagaaaacatggagaatctttcccaagctggaaaagccttcatatataacttcttagcgtcacgatatgcttttgtgccccatcgggcgggtttagagtctaaaatagtatccttcttttctaattaaaaattgattgttaataactctgaataatattattatacaaaaaaatttcctgaattgtcaaattaagtgcaacagttaggttatgaagaaatatattgcttgaagagttcctctgctgtgtgatattggaggattcggcgatatttgtggttaatggcatcagttgcctgttgaacataagcttttgacttgtctttcatgctcttgcccttagggaagaattgacgcaaaagaccattgcagttctcattggtgcccctttcccatggagaatatgggtgagcaaagtaaatctggcagcccttgatcttggtcatatccgcaaactcagagccattgtcaaacgtgattgatttaaaccaggcaggatgtctgtcaatctccttttgaagcagcctttggcatgtgcttgcccgatagtcaggaatcttgataactacttcaaagcgtgtggttctttcagtcaaagtcattaaagcaggctgattcttgcgtctgacgcctttaaccagatctccttcccagtgcagcggagcttttctgtcttcaatctctttaggacgctgttcaatggaattgccaagatgcttcttgtgcaaagcgtgaccgccatggctgtgatgacgcttgttcctgcgtcttttgagcttcataggcagatcaatattgcttatgtccagcaagccctgatcaatatagcgatagacagttggtgtgctgggacaagggtagcctggcatagtccttttgaattcaccaacgaactcatcgatgctggtggcatcaaatttagctttaaagcgtctggagagcattctcaaaaagacagcataatgcttcaatggattgcgctgatagcagtttttgcgacgcttctcataataaatctgtgcagtatcagcgtaatagtgctcatacaataaatagctgctgtctctttgcaggacgcttccgcgtttgatttcgcgactgattgtcgacttatggcagccaacttcttgagcgataacagtacgggaagttatgccggaatccagcattgcttgaatttgtccacgttgtacgctggttaattgatgatagtgcttagaaatgctagaatttgaattggtcatgaagatcttcctttcttgatttttcgtcacttcaagtttaggtcttcatggcctttttgtttaacacttagtgttgcacttcaattttaaatccgggtacaaaaaaatttgatagtttcttaaaattattttatatccgttcaagctaatctaattcaaattagtttaatttctacctcaactttaacctgtaattcaaattaattttaatctcttaagacttttgagataagttttaagttaacttgaatttgctgaaaattttactgctagatttaaataaaaagaaagcttgtcatctaaccaatgtcattaagttaagacattgacaaattatcgacttggacttttaagatcattcatttgtgatttatcgcatttgaatgatcttttttcatgccaaataaacccaaattttgtttagaaattaggctacacgatataaataatatacagctgatttgggtttgagatttcttttgtcttttcgtcctggtctgatcggaattgtgtaatgactaatttgaataagaatctttttaaagatttcagttgaagaagaaattatatacatagcctggatgacaaaacatgactgtttgaaattgatcgcatattgatacttgcagtttttttgtggtacatatgcttgagcatcaatttgactgactacgttaaacataatcatgtgggcatagatctccatttcaataaatctatcctgcttggaatgaaactgtacgctacctaaagcatatttcaactttttgaatgaagtttcaatgccccagcgcaaatggtagatctctttgatcctttttaagggataatcggctctatttagattagttagaacaacttcccattcttctttgcctgatttaggatcattaattctaaatttacaggcacgaaattttattgtacataactctccaaagtcccagctgccatctttggtatttttagaccgatattttatatattgacggtaatgatggttaaccaaatgaacgttttctgtagccttatgggtttcataataataattagaggtagtcacccagcaagctatatccttatcacactcttgattaggcaactcagctacttccttaaatgcgccatatcccgttttagtacgtatgacataataacagttaggcaggcgattacaattttcaatcatgttaaagccggtataacctcgatccatagtaactatatatggtccgcaatttagctttttaagcatttgaatggcggctttacgttcatccatctttgacttaggctgaaagatgcagtcttgataagtattatttaacaggtcatagagtgcattaacatgaatttggcaatatggctttcctttatgattgagatttccaacgatattctctgatttaggattccagatttgattaaaatcagacccatcaatggcaaatatacgatatttatgatcaaataactggatattaaataaattctgattaaatacagttagaatatgcttaaaacatgcgggtgaaagctgacctttgcgttggacataagcggaagtactgactactttatcgttatttttaatagctttttggccaaaagctctaaacaactcactggtcaaatcttttccttgcatattaatagtagttttaatgactgtagctgcatctaaaaaccgcttcctagtgaaggcatgaggatcatcgataaaatcatgaatatgctttccagtatcattgataatttgatcaagacgatctaaaatatttctgtgaagggctttcataattaacaccagctttctggcaataattttgaaggtttaataatttaatcagagggcgaaaaggtaggttcttttcgcctttattttatgcaaaaaaagaaccaaatcataatgattcggttctacagagattagattcaatttgtcaatgtcttaacttaatgacattggtcatctaacaaactttcttttttcatataataatcgttaactacatcaacttatatttcttcatcaattcttcaatatatgtgcctagaagttttatactgaaatcttgttctctctcaactttgatataaatttggcttccgcgccaaatttaaggatatgcaaagaaagacgcaattatcacatttttaattaaatatgagttaattgataatgagctgcaatttgagaaactttgcatttatcaactatttctgattcactcatgttttttattctttcatatggcatcaataattcaccggcaaaacattctgcttgccattctggatttttatatattggaatttctccatttcttctatatagagtcagtgaagaaggttgatgtaatataaggtgtagcaactcatgtgctattgtcattctatcacgtccaacatttctaatcgctcccatgtacaccgattctttaataagaattttatccttaacgatatcagtttgtgcctgaacatcatattctaattcatcattgtctacaatttcaaatgaaaaattaggatctaattctgatattttttctagtacacgcgtaatatcaatataaagttgacaaggatttatccctaataataatcgtacatctctagctaatgctcttaaatctttacgagattctggtttaacttcaaatattgaatcataactaattatgtctctcaccttctttcaaaatcttctgaatttgagctatttgtttatctgtcaaatcatcaaattttcttgcaaacatcaatgtagcttcctgcttttcaggtgaaaatttagatatatccaagctttcttcacttatgctcaatgcatcttttagctcttgttcttgctctctatccaagttatatctatcaacaatattattaattaatgatgcggaagccttcttatggccattttcaacaccagataaaaaagccgagcttaccccgacgttttccgccatatcataaagtcgttcatctcgatctaccctaagttttctcaaaaattttcccagtgctgtataagtcatagtttactttctcttttctaatatttactttctaaaatctttattataaataatctcattcactgaaagaagatcatatcttttaacatttaaataaattatactattactttcttttgtatcataagctggcaaataaaacagatcaccaacggagttaaaaacctttctaaattttacaccacctactttctcttgacctataactttaaattttgtcccagaaacagaatcactcaagtcgcccaaaatactaattctacaactatacctgttgcctgtttttaaaaaattgaacttatcatctcctaaaatatctgaatcatcaaacacagtataactttgattcgttttttgactctcaagaacaagatctcgagtaacttcataattaatgatttttgttaattcatacatagtattttatgcctttccaatcggataaaaactgacgatataaccattatctccatatgctattaaatatatcattccattgtgattatatataaaaacatctgctagctgtttaccttcttttctacttatatgtttaattggctttaattgaagaattttctttgcaagcaaaggaatattagtgtttgaaccaaaatcttttccatgccgagtttttatatgcaataacccactttttaagtttcctttctccagccacattaatttaccagcatagtttttcgtaatcatcactatatctgatttattatacttagcattactgttttctaattcatgcatcaaatctttaggctttagtcgttcttttgcaccattagtattaatataccctttataaccacttcccatcagcaagcctccttagcaaaaatttcttgccatgagggatatcttataaatttaatgtttcttttatatggtccaaaaatatcatcgggcatcgtaccataaaccaaaacttttttgggtctaactttttctagagcaatttctaatccagcttcaaataatattcttttttctttatcagcaatttgcccatatgtacccactgaacaaacttgatgcttaggaattccctgaaaaacaaaatcatatgatcttttatcaccccaacgtaaatttggaataatatttaaaccataattttgtaactctagagcaactctatttttctcatatacagcaaatttttgtaacactaatggttcgtcagcataaatgctataatcaggctggactacagatcctgcttttaacaatgatggaacaagtttagcaattctttcatcctttaatttagattcaaaacttttatcccattcatagaaacaaatagcatcatttaatgacgctatttttctgtcagaaaaacgaatcatttgaaaagggatcactaaatcttctttttgcttattcagtactgggtattcatcttccccagtaaaattagcattaagtaagttggacaatattatctcctcacattctactaaaaatcgaagagaaacatggtacactaaatatggttacagaagtatacttgcttctcttgcagcgattgtttcagcaatcgctgtattttatttctgttttcagttaatattattaacttatttagttaatttgtcaaatataaaaagaaagtcttgaactgagacctaaaagttagacacttttaggtcttttctacgtaaagtcaagcataataagaagtttggcttcattttttgtttaaatttcaacttaaacatcttttagtgtcgatttatttttttagttagacacgacaaataagcccagatccatatctgatttttgggcttagcgttataatgtacttgatcaattaattacgactaaagtctttttgattatgtgtggctacgttgtaatcatatggttgatcattgataatcagggcataaatggttctgattagtttatgaattgaagcaatagctatctttttgaaccctttggtttgagaggatagctttttgctttcataataatctgctatatgacacggatttgtcttagctgcattatcaatttgtccaatagctcgataaagcaacttacgtgcgactgcattgccatgtttagtaatacttaaattagagtccatttctcctgactgatatctgcctggatcaattccgataaaagcattgattttattaggattactaaatctgcgtaaatctcctaactctgctaaaactctgacagcagtggtctgtgcaaagcctggaatgctttctaggttttctaaatcatgattaggcaaagacttcgctaacttaaccattcttgcgattaaattttctctttgatcacttaaattaagcaatctgtgtgcataatactgcacttgctcgacttctatgctagagcaagatacaactggataagcttgataagctaattcaattaatttatctgcagtccttagagcgtgtttaaaagcaatcccctttaagctcattaaccagttaataagctgttttttatcttctcttcttactaagtcacaatgaggatatcgcacaactatttgccagtaatttttacctttagcagaagaaaatagattttcaatttcaggaaaagtcgattgtagagcttggtaaagtcgatttttagccattactaagtcagctgttaactggtcatagaagcggctcaaagcattaagctgcttataagtttgagattgaagttgattaattggatgatgatatagtctttgaattaaggctaaatgataagcatcagttttatcagtcttattatgacgtagtcccatatccatttcttttttagctttaagaggattaagaattacataatcatagccatagtcttccagaaaagattgcagtctgcgtgaataaacaccggtagcttcaaaaataatttgcggatgtttagaaaaagcggttaattcatgaagcaattgaataaaaccaggacgattattagtaatggttagttcatttttgctttcaccaattagttcacaaacagaagaaaacttgcgattgcgtattgtgaacgaatacgtaaaaaaactaagtgccttggatcaagaagatcagaagaaatagctagggtgattacggatctaaggcaagaattcaaagttagtttaaattatgtattagctgcgattgcagagcaccctgagctacctataattgccagaagctcatactacaagattatcaaacgacagcccgtcaagcctaaacggtcaaagcttattgctagaatccatgagatttttaatcatcatcaaggccgctatggatatcgcagagtagctttgcagttaatcagagagggctggaaagttacggagaaaaccgttcgctattggatgcataaattaggtcttaaaggcatcaggtgcaataagcgcaaatattcaagctataaaggtactattggcaaaatagctccaaatttaattcatcgtgatttcttcgcagccctgcctaacacaaaatggtatactgatatcactgaatttcatcttaataatgaaaagctttatttatcgcctattctagacggctgcggtggcgatatagtttcttatactatctccaaacatccagatatggatttagtaatgacaatgcttgacaaggcttttgccaaagaaacagctcttaataactgcatttttcatactgatcagggctgtcagtatcaaagccctcgttatcagcgagctttaaaactccatggtattactcaaagcatgtccagaaagggcaactccatggatgatgggctaatggagaacttctttggcctgctcaaaactgaaatgttctatgatcaagaatacaagtatcataatcttcaagaattaactcaagcaatcgaggaatatatcgaatactataacaacgaaaggataaagagcagattaaaaggcttaaccccgaaagagtatcgaagtcaagcctctattaatccaatattttaattgtctactttttacgtctcagtacatctgtcaatctaacaaactttcttttttcataaataatcgttaactacatcaacttatatttcttcatcaattcttcgatataagtgcccttaaccttcttaagcatccctttaattgcaaacttttcaggcattggcaaatcaagatcagccaacttcttctggtcattcaggtaatacatcgcattcatcaacattctgacatcaaatgcggaagcgaagacttctggtacaccgcggtcaatattaagcaaagtgtagacagcttccattgccgtccgaactgaatactctgtcgtaaagacagtgtctcttggagtttcggcaaagttaccaataaaggctaagttcttagaatgatctggaacaacctttgggcggtcgcctaaagctcttggcataaagtaagaagtaatatatggcatgtgaaccggaattgttgtagctgcggcagctatttcaggaattctttcttccggcacacccatgtgatagagccactcttcacacatttcaagcccattacaatcaggcatcgtcttttccacataattacctttggtatcagagaacaaaccatataaccaaacaatcaattcatttggtttttgcgccttaaagtgtggctgacggctgattgagtaacctaatagccaattagaatccttaatagtagttggtccactagttacgattgagccactgtgtggatcctttttattaacagcttcaataaatggcacaacatcatcattcttaaaggtaatagttgcagacatccgccagttagcctttggaatatccttgcaaaagacatcaggatggccaaagtcttcatcttgagctgctaagttcttccacaatcgccagcttgcacccaattcatgttctgctggagcgggatgcagttgatctccataggtagtactatcagtaattgaaccattagtaacgaagactaagtcatttggtgttaagtcaatggtcttcttttcgccatcttcggttaaaataatttgtttagcaaccttttcgccgtcagagcggttaacaaagatattatcaaccaccgtattatagtggaagattacaccacgatcctttaaatacttgaccagcggcaaaatcaatgattcatattggttatacttggtaaaacgcaatgatgaaagattcttcaaggttgctacatgctgtacaaagcgcatcaagtagcggcgcatctccatcgcacttgcccatggttcaaaagcaaacattgttgaccaatataaccaaaagttagattcaaagaattccttagtgaagacttcattaatcttcttattttgcaagtctttttcgggagttaaacaaagatcaacaatttccttcactgcctttggcgttaataaaagttgcccatcagtcggcaaagcttgaccacgatttacaattactctagttttagcataacttggatcttttctatttaaacgatagaaggaatccaaaatagattcaccttcatggtcaggcgaagggattgatctaaataaatcccacaaacattcaaagtgcggctccatttcacgaccgccacgaatgatgtaactttccttttctttattatagatcccatccattgagccaccaggcagacctaattcttcaaaaatgtgaattttctcgcccttcatttgaccatcacgaattaaaaagacagcagtagctaatgcagccaagccactaccaacaatataagcagatttttgatcaacatctttaggtttatcagccttaacaaaggcttcataattgccattactataatgcataattgacacttctttcaataatcgttacacttgtaactatttacgcttataatataatgtaagcgatatcagttgtcgaacattttacatttggggatgatcttgatgaatatgaagagtctgcatacgcagcaacaaattgaacatgcattattcaaattactacaaaaaaagccttatacggagatctctattgcagaaatcacccgtaaggctaaggtatctcgtacttccttttatcgcaattatgaccaaaaagatgaagtcattgcgcaatttttatttaatcaataccataattttatcgctgatattgatcaacataatttgagaacttttaagcagcagcttactgcctaccttgaattcttcaaagataatcctcaactaatgaaattactgcttgatgcaggatttgaaagagaattacttaattttcaaactaaatatttgaaaaagctgatgtcagtttaccattctgatgtccacctgcccgactatgcaatagcctatcaatctggtggaatctatatgctgttagtctggtgggttaagcaaaattatcagaccagcttgactgatttaatcacttatgccgaaaaacacattatgctgtaactaaaaaagaagagctcacaaatcgagctttcattttcaaaattattgcaatttcttgcattttttaccaaagttaaagtagaaattcattacaaaggcgataattaacaaaatcaatgaaaccaacataatttccttaataccgccgtggaaaatagttctcattgttggcactaagttttgcggcaaactcttggcacttcgcgcatcactcaatttattcatcatggtcatcgtgattcccttgtgcgtttgaactccgctggccaagttcagattcataattacgccataaacagcagccattactgtttgagctaaaattctgatcaaatatgaagttgaagtggccgttgccatattctttagtcctgcatcaagttgtacctttaattgcaaagcaacaaagataaagccaaccccaatgccagaaaatgcaccaataaaggtcaacatctgcacaggcgtatgtatgccagaaataaacaaaccagctgatgagataatcatggcaactattccaatcaaaactaatttaaaggttgtcatatgctcctgaatcgccgctacactttgagatgcgataatttcaacaatcgaatttggaattaacgtcatcccaccaattaaagctgacaagcctagtaatgcctgagcccacattggcatataggtgtttactgctaaaaaggcaccccaagtaaaggcaaataataaaaagtcgccatctaaatctttatttttaaataaagaaattggaataattggattgtctgcatgaccttcgcgaataaagaaaaagacgatgaagactaaactaattataatcaatccaattatgatccagttagcggttaaaccaactagttgcacgcccatcaagaataaaagcagtccgattactaataaagtagcaccagggatatcgaaaaccggtgtcttttttggagtaaccggtttgtagtaaattaaacaaatcaaaaatgcgattaagccaattggaatattgatatagaagacccagtgccaagagaaagcatcaattaaccaaccaccaacaagtggccctaagatcgcagccccattccagctggcagttaaatagcctaatactttggttctagttttaatatttttaaacacataaccagcaatgatataaggtaaagaacccataccacctgcaccgattcccatgataaagcgagagcacagaaagaaaataatatttggcgctatcccttgtagagccgatcccaaaacaaagagtagcagtgaaagctcaaaggctcgtttgttagtgattttctctccgatcttggtccaaatcggaatcgaaatcgacattcctaataagaaaattgccacaatccaacccatgaattgaattccgtgcaaggccgcgacgatggctggaatagcggtattaataatagttccgtctagccccgacatcacgttgccaagcatcaaggctgccgtcaccattgtaatctgttttttattcatgcttaacttctttctatggtatgtaaaaagcgttagacaaaaatttctaacgcttttgagtaaaaaaatatggaggatacagggctcgaacctgtgacctcctgcttgtaaggcagatgctctcccagctgagctaatcctccattatggggcggaatgtgggaatcgaacccacgcatgctggatccacaaaccagtgtgttaaccccttcaccaattccgccatcaacggtccatatgggatttgaacccatgatctcctccgtgacagggaggcgagataaaccactgctccaatggaccaaactagaggaggatgtgggatttgaacccacgcgcggcataaccgcctaacggttttcaaaaccgtccccttaagccacttgggtaatcctccatagccgaacagatactagtataccaaagtgagaagataacgcaagaccttttttaaaaaaaagcaaaaaaataaagcctttcggcttcattaactatgtaaatttttctggaacagcaaatacttatattctttgccagcaatttcaataaaacgttgagtagcaatattacgccagccaaagtgcttaaagaattcttgtgcatctttatcttcagccagacaccacaagtaaatcttgccatagcccatcttcttcagttcattttctgcggcatttagcaaggtcttacctacattgtagccttgaaaatcaggtttaacatataatgccatcaactcaccgcagccaagcattctagtgtcacgtggacgaccatagctaacggctgcttgaacctcgttattatcgtctttaaaaactaaattatgacgaccactctcattgagtcgttttacccaagcagtagccggaatattatccaaaaatacatctggtagcacgcctttatacgtctcttgccaagttgtttggaaaagcttacttgtttgttttgcttcgtcttcactaattaatggtttaataatcatatttacttcttctttgtcaaaacagtcacagcctctacatgtggcgtttgtgggaacatatcaacaggatcgattcgcttaaattcataaccttgttcttggaacaaaagcaagtcgcgaatcattgttgcaggattgcacgaaatataaacgaccttcttaggtccagtcttaactgtcgcattaataaattcaggtgtcaacccttttctaggtggatcaacaaaaaccacatcggtcttcataccctttttagcccaacgcggcattatttcttcagccttgcctaagtaatactttgcgttttcaataccatttagctcggcattgtccttggcatccttgatcgcatcccggacaacttcgattccacgcacggccttcacatgcttagctacactcaaaccaatcgttccaattcccgaatatgcatcaattactacatcatccgaacctaaatctgcttgcttaatcgctaaatcatacaagcgcggtgtttgcagcgaattaatctggaagaaactttgaggtgaaattctaaactttaaatcaccaatttgatcagtaatctggtcattaccgaaaactaggtaatcctttttacccaaaatcacattggtcttcttaggattatagttcaagactaaacctgaaaccttaggaatctggctaatctcagctgcaacacccatcatttgtgggaaatccttaacccggctgaccaaaataaccattatctcgccattagccttactacgacgcacatcaagatagcgtataattcccgtattgtttacctcgtcataaggcgcaatcttgtacttgcgcaacacatcacgcactgcaaccaatacacgatcaatttccggatcagtggtaaagaaatttgtcaaaggcactaaatcatgtgaatgtcgtctaaaaaagccaatctcaagttgtccattatattctcgcacaggaacttgggccttgttgcgataccctgtttgctcaggactaggcaaagtttgtcctacttcaatctcatctaaatgtgccttcttaagtaagttaacaacttgattacgcttgaattcaagttgcttatcatacttgatatgagctaaagaagcgagtcccgtttgaacccattgattcaacttgatcttaactcgatcaggactttctttttttatttcttcaattttagcaaaagcaaagttcttcttaacctttaaaatctttgcactaaccacttcacctggaagtgcattagtaacaaatacggtcattccctcgtaatgggccacacccattgcttcatacgaaagatcggtaatttctaaatctataatttgattctttttcatactcactcaaccttaaaaaaatagctctctattattataatacttgaccaatctttgtgcttcaaaaaataatcgactgctttttagaaccaactatcacccatatacgcatgcaaaatgtggttagccgctactttcaacctaaaataattaatattattagaaaatagcataatcatacgcttggtcttgtaattcgcaacaaagcagcaattataaccagggatactgccattagcgcgaatgatgtcaccattaaaatacactccaccaaaataagctaccgtctgatgctgggcttggtggtaatactcgtttaccattttaggatttttcagcacatcgttatatacaaacttccaataatcaattggtgacatgaataagttccctgctccaaagtccgacgacgtcgtcactgtcacttggtgccagtcaacatttttactcattggctgagggatctcgttttggttaacctcagaaaaatccttaactttctggagcttaagtggcttagcaaaatcggtctgaatataagcattataacttaaattagtctgcttgctaataatagctgctagcaattcataatcaacatcttggtaatcccaagtatgaagatgatcattctccatgtgattaagcatataagctatttgctctttctgatttttaagcggagaagatggtcgagcattgttaaccaagccactagtatgattcatcagcccatgaattgtaatatctttactacctgaaacttgaggataatagttagataaagaggtattccaacctaataacttttcttgttgcagctgataaattgcagttcctgtcataattttttgtagcgaagcaatcggaaacaattgattagcgttaactatttggcttgaatcagtggtctccttattttggacaacaatcggttgcccctttttatcattaattaacattacaccgttgatatgatgaaacttcatataatcatgcagctgttctttctgattcttaatgccattatccagcttatcccctggctgcacaatgaataaaaatattgcaaaggcacaaagtgccaaaaagatggataaagctcgttttttatgcataaagattcctcttaattactatcccaagcaatgtaataactatatttcttcaattgtaaatctagtatctaggaagactcaactatttggttaatttttgcatctaaaaatattttacttaaatctattgacatacttttttaatcttgctatcatattgctcaacaagaaacgaaaagtagcaactttgctcagcgttcagagaactggtggtagctgcaaaccagacaggcaaagtttgacgaaatacgtcgttataatgttgttcggaaaaattcagaaccgttaccatctgatagagattcaagttcttatgcttgaaagagtgggtggtaccacggctattgtcgtcccgttgacttaggtcaacgggattttttatttggaggaataaacaatgaaaaaagaaaaaatttcctttacagaatcaatcattatcctgatagctctattagctatcctcggcattgctgtaatcaaatttagtctctcaccagaagtgcctgttttatttacagtccttctacttactttctgggctagattacgtggcttctcctggcaggatgtccaagatgggatcaaagaggggatcggcgttgcaattattccaatttttatttttattttaattggtgctttaatcggaatctggattaaagcaggaattatcccttccattatggtcttaggttttcacttaattagtggcagcttctttgttccatctgttttcatcgtttgttctatcattgggatggcaatcggtagcggttttacgaccatctcgactgtcggaattgcgctttttggcatcggtactagtatgaatattaacccagcattggttgccggtgcaattatttctggtgcggtattcggcgataaaatgtctccgctatccgattcaactaacctttcttcagctgttgctgaaagtgaattatttgctcacattaagaacgtgatgtggtcaacaattcctgcatttattgtttcattaattttattctggattttaggcaacagtggtcacatggacctaaccaagatcgaacacacttctcgtattctccaagctaactttagcatcacgtggtgggctcttatcccgattattttaatgattttctgtgcatggcgcaagatcccggcaattcccaccttatttatgaacattgctgtcaccgttataatgatttttattcaaagcccacacgaatcaattcaatcacttaataatttagtcatgaatggctttgttgctaaaaccagtgataaagcagttgacgctctccttacccgtggtggaatttccagcatgatggcaactgtagcattaattatttctaccctatccttagggggaatgttgatgaaatttaacgttattcaaagtgccatggagccgcttgtaaagcatctcaagaaaccaggtcggttaattacagtcactattttgtcaggaatctgcatcaacctttttgttggtgaacaatacttatcagtaattttacctggacgtgcctttaaacctgcatttgataaaattaagctttcaccattggcacttagccgcgtgcttgaagatggcggtagcgtaattaactacttgattccatggggagttgccggttcatttgctgcctcaactttaggcgtacccgtcttacaattcttaccatttgtcttcttcagtctgctttcaccaatcttctctattttaagtggaattactggaatcggcttgaagtgggttaaagaaaagtagaaaataatcttgtgaaaaaagttcctaggatagttgtctttaggaacttttttacgcaatctattagaactcaggaataaataatgcaaattaatgaccacaaaagtaactggtagttagctgatattggtgattatcttaaggttatcgctaatggatgtgtcatgttacagccaattattattcttttcttgaccttaccatttggctattcgcaacaactctttttggcatcgctttataacctagtcaaatttacgtcaccagccttcagcaacatggtcattttcacaatgttgcttcatttatttggcaatttttcagtggcaatgctgcacctcatctttggtacagtgtcatgatgctgcaatttttacttattatgccttggattaaggctatctgtaactgggtcaagcattcttattgccgcctagcagttgcagttattagatcgtatcttcatcagctttctaatttttgggctctacggtggtttaagctggaactttcatcatgaaattcagacttttctatttaaatattggtagctaattgttggaatttatcttttaacttacttttggaacagagatttatttttagctacttccaaattaacagatctaaccaacgacagttattacctaccttcaatggcaatttatgctttagctgttatattcttgacttacctaatctgtattgcacaaaaagtctttaatatgaaccattggctaaaatcaattcattttctagctttttatgcttatcgagcatttttagccaatgttttttgggatcggatcttttggcaatattttaattttaaacagctagctttacaaaacatttatctagctgtcttactactctggatttgcacatggtgtgcttcatatttatctgtttatgtaattcaccaactttggcttaaaattaatgattctgtcgatccatcctaatttgcgcacgtcgatattcctgactgtcacgtgtaggttgagcaattatgtctgtaactattatttcatgatcatttcgttcaaagacgattgcctgatctaattccgcatttacttttttattgatagtggaattttgattaaatttcaaatcatcaagctcccgatcaataaatgctttttgcgagctggttagctgatgatatttatctgcagcagctttagtaaacgacagaatcattttacgattaaactcacctattttatccggatgctcacttctttgaccgcgcacatcatcatcaatatatctttttttcatcaaaaatcacttcctctatttttactatacaggagatcatttctattagatatttttctgcttggtttagttttttcataagaaaaacttactatttatcatttatgtcctaaatacggtaaaatagataggacaattaaataaaaggagtgtagtaatctatggataacttttctaatactccaggacggcgtcaagtccaagatatttctgcggttaacagtttcttaactaagatgtacagtctaatgattttagctgttttagtttctgccgcaactgctttcttgacgacaactgtatttgcttcagcaattgctaacatgtcacaagccgtttactggatcattatttttgttccaattgttttatgtatgactatcagctttaaggcagctaagaatccgacactaggtttagtccttttgttaattctttcagcagtctatggctttgaatttgcctttattgcaggtgccttcaccactgcctcaattgcgggtgcctttttatctgcagctggggtatttgcagcaatggcaatttttggtactgtaactaagcgcgatttaagtaattggggttcatatcttggtgctgctttaattggtttcttagttgcatggctagtaaatgccttctttatcagaagcggtgctgccacctttatattctcttgcattggtgtattacttttcactggcttaacagcttatgatgcacataatgctaagaaaatttatatgacttacggtggtcaagtttcagacaccggtttagctgtaatgggtgcgttaaatatgtaccttgatttcatcaacattttcatgttcttgcttcaaatttttggcatgggcggaaatcgcgattaatctataattataaaaatagcgttgattggcttacactaatcaacgctatttttatttgatgatttcttatcctttttaagaaaactagtcagttcatctagcggcgtcttatgcaaaaatgccataatattttctctcatatcataaggtgaaagacgatcactgtagtttaataaaacccgaactaaatcaatcatactattaataaatacttgaacatcaataagcattgctattctttctttaccggtcaatttaatcccttggctatcatccatactattaattctctcaaaaaactcatcacaactcgtatcaaaaatcaaattataaaaacgaatatcaccattatctgaaagtagcaattgaatttcacgtttatgatcaaaacaataagaaatagtatttttggttgctgataatactgcttttaattgatcttgtgtaggaagagtcatatcaatattagctagagattcgcgatcacgtctaatactatctttatatccttcgataaaatcattttcaacgtctgccactaagctattaacgtctgcataatattgataaaaagttctggtacttacacctgatacttcaataatgtctttgacttttaactcataaacacttttttcttctaagcatgttagcagagcttctactaagcgattcttagtattagttactctaatatccaaatagcacccaatcctttcatctcattattcaaacataacatccggtgaaaataacattttactatcgtccaaatcttttttactttttcaacctaactgtaatttcattgttttaagcaagatgcattcataaaatagtaattgaaaaatgtaattagtaggtgatataagatgtttaatcaaaataaaatcattatttttaataatagaaaaaataattgctctaagaactatactttacctatgcatgatcaaaaactgctaaagcaatttcaatcaagtctcttagatgacataacatattatccttttcatcctcttagacatataaataagacttttgttagattcatcagtacttcaggcaagcctttattcaacgattttgtctatcatttgcaaactcgtgaattaattttgaatgacttaatcttaattagttataagtacctggtcaggaataaagctaatattgcttactctgatctaagaaagaattgggtaaatgtatttaacttatccttctgtaccaacgatattaagttcaacaaggaagctttattaaacaaaataaatgaagctaacaagatgtaattattcctttaacttccacatcttattaaccaaaaagaaaaagagttcaagtttagattgcttgaactcttttcgtttcttttgcttcaatttattattgtcttttagttagcttagccaccaacataaaattcaatatgctgttgcaaattgttaaattcaactggacaataaccaccgatctcaccatcaagattaactggtaagtcttgcccttcacttttaccaatcaactcggccttcaggctacgcgttttggtataaatgatattgggatcatcaacatgtttaccattcaaagccaatgccatcaacttcatcatgctaacagggtcagaaggcttgaccacgatcaattggaataatccatcactaagctgtgcatcaggcataacttgctcaaaaccaccaattgaattagtcattcctagtaggaacattgataattttccttcataaacgccatcatcataagtcaaacgcatctcattctcagtcaagtgtggcaacatttctgcccccttgattaagtatgcggcataacccaaagctgacttaacctcagatggtacgccatatgttaactcagttaaagaaccgctggcagcaatattaacgaaatattgaattttgtcaccaaaaacagctttaccgatatccattttacgagttttattctttaagattactttagcagcatctggaatattatcacgtggaatggctaatgcacgagcataatcattagtagtcccagcaggaataattgccattttaggcctgttttctaaaaaggcaatcccgttaactacttcattgattgtaccgtccccaccagctgctacgattaaatcaaagccttccttagcagcacgagtagcttcattgcgagcactattttcttcaggtgtagttctaaaagcactagcttcgtagcctgcttgttctaatacatctaaaatatcggccacattctttggcatctgttcgtgacctgatacaggattataaattaatcttgcttttctagtcataattactacctaacgttctaaaaattaacgactttgcaattcttggttaagtaacttgttaaccatcttagggttagccttaccacgagtttgcttcatgatttgaccaactaagaagccgattgcacgatccttaccattcttaaagtcttcaacagattgagggttatcatcaacaaccttcttaaccattggagctaaaacagaagtatctgacaattgaaccataccattatcttcaacatacttcttaggatcagtaccattttcaatagtttcggcaaagaccttcttagcaatcttagatgaaatagtaccgtccttgattaacttgatcatttctgccaagtgttcaggagttaacttaatatccttcaattcaatacggtgatcattcaagtaaccattaacttgagtgttcatccagttagctgcaagagttggatctgcgccagctgcaacagcttcatcaaagaagtcagaactttccttagtttgaagcaaaacgttagcgtcatatggcttcaaaccatatttatttacatagtcatcgtaacgagcaaatggcccctttggtaattccttagcaatttcatcgatccattcttgtgaaatatgatctggtgcaatatctggttctgggaagtaacggtaatccgatgcgccttccttaacacgttccaaaacagtcttaccagttgcttcgtcaaaacgacgagttgaaagttgaatatgaccaccagctaatagaacttgttcttgacgcttttcttcgtaggcaagtgaacgacgtacgtgatcgaatgagttcaagttcttcatttcgaccttagtaccaagttccttttgacctgctggacggatggaaatgttagtatcaacacgcattgaaccttcttccatcttaacgtctgaagcaccagtaaactgaacaatcttacgtaacttttcaaggtaagcgtaagcttcttctggatcttccatatctggttcagaaacaacttcaagaagtggcacaccctgacggtttaagtcaacgtatgaataaccgttagttccgtgagtgttcttaccggcatcttcttcaatgtgcatttcgtgaataccgattctcttcttcttaccacgaacttcaacttcgatgtaaccatcacgagcaagtggttggaagaactgagtaatctggtaagccttagggttatcaggatagaagtagttcttacggtcgaagtgagtagttggcaaaatgtgagcgtgggttgcgatggcaaccataatacctaaacggtaaacgttcttgttaaccattggcaaggtaccaggcatagcccagtcaattacattagtctccgtgttttgttcagcaccatatgttactggtgaaggagagaaaatcttactctttgtctttaattcgaagtggacttcaagtccgatagtcgatttaaaattcattcaattagtcctccattccagttggtgttttttcataaaacttgttagtgcgttcgataaagtcagcagtcttgaagacattaccttcatcaaaacgcttagccataacttgtaaaccgacaggcatcccatcaactaaaccagctggaacactagctgcaggaatacctgctaagttggcagaaatagttaaaatatcattgttgtacatcttaattgggtctgaaacttcttcgccaataccaaatgctggctcagtagtagttggtccaacaattacatcattttctgcaaagatcttgtcaaagtcatcacagatcaaggttctaaccttagcagcttgtctaaagaaacggtcatatgaaccagctgaaagggcaaatgaaccaagcataattctacgcttaacttcagcaccaaagccttcagaacgtgatttaacgtaaacatcaagtaagttcttagtgtccttagcacggtagccgtaacgaataccatcgtatctttgcaagtttgaagaagcttcacttgaagcaatgatgtagtagtcaggaacaacgtatttagtatgtggcaatgaaacctcattgatcactgcaccagcatccttcaaagcatcgatttgcttttgaataacttcacgcatcttaccgtcaactgcttccatgtattccttaggaacagctacgcgaaggcccttaacatcttgaccgataaacttggtaaagtcaggtacttcacgggttgaaacagttgagtcatgctcatctgcaccagcaattacgtttaatacttcagctgaatccttaacgcgcttagtcattacaccaatttgatcaagtgaagaaccaaatgcgataagaccccaacgtgatacacgaccgtaagttggcttaataccaaaaataccgttaaatgcggctggttgacgaattgaaccaccagtatctgaaccaagtgctgctacaacttgaccactagcaactgcagctgctgaaccaccagatgaaccaccaggaactttatctaaattccatgggttgtgagtagcaccataatatgagtgttcagttgatgaacccatggcaaattcatccatgttggtcttacctacaaaggttacgccagcttttttaagcttagaaataactgttgcatcatacattggcatgtagttgtacaaaatgtgactagcagcagttgtcttaatcccgttagtgatgatgttatccttaattgcgattggaatacctgctaacttactcttggagtagtcaaggttatctgcaggcttagcatcatctaaaacagtgatccaagcatttaacttcttatctgtatccttaatgtttgccacagtgtctttagctaacttatctgctgacaagtcaccgctggcaagctttttgtttaatgaatcaatattttcgtttaagtaattcattactcgtcctcatccttattaataattacaggaaccttaatgtagccgtttgccttttcaggaacgttagccatcaatgtttctctgtcttgtccttgccagtgttcaggtttatcttctctgaagacagtatcacgatcaacaacttgaactgtttcatcaacaccctcagtatcaacttcactaagttgatcagccatattgataattgatcccatttgatcagtaaatttatctaattcttcttcattaaacgcaagtcgcgaaagagtcgcaacgtgtttaatggtatcttttgtgatttccacgcaaatacctcctattcgccgccataaacatggacttgataatcactatcgccggtttcttttgcaactaaagcttgtacatcatctactgaaccaattttgatttcaattgggatattgccagacaagtactttttagctgacgacaaaaccaaacgggtaaaactttgaatttgttcatagccataaaattgcgttgttacggaaatgttttcttgtgaaagcttaccgtttgtataacgcaaagttgccgttaccccactaatattagggaagtagttttgaatagccgtcttgaaatcattgaagtgcgatgcatcatcactgttaattgctttttcactaccagttgtcggtaaaacttgcattttttccgacatggatttccatttagatattttactactattagcggccgctgtcccgtaagcgaagtaagttccaccaactaatgaatcttttccagtcttggagaacaaaccaatcgtaatcggaatattctttaaagctttcttcttacgcaagcgagcaacaatttcattagctattttttcaccttgagctttttgctcagcacgtgaaatagtagtttgaaattctgcaccgttacgctttttctgataataatcaaccgaattcatggctaagcccaagctcataccacctaaattatacttggaaccagatccagtcaaataatcttgttcgataatttcttccaaataaattggattacgcgtatcggttccggtcttaccattatttactgggtttaaaccatcaggatttgatttggatttacgcattaaccaatcagttacagttgaggtatccaaatattgtccttcttggaagacgtattgattaggcgaaaattgattcttagaaatttgaatcagccctcgctctaattcacgcgtatcaacagaattatcattatcagtagctgttaatcctgcaatcggactaatattatagcgaccatttttcattaaaacggtatagccattcgttcccgtgttagtagtttgatagctttttttcttagtggttgaagtggttgtcgcattatttgctaaactagaatccttcaacttaccacaaccacttagagtaagcgcgattccagctaaagccattacttgcaaatattttttcacaataattgtcctttattcaatttgtgcaattgcttcttcttcagtcaaaagtggtacgcctaaagtctgcgctttagtatacttagaaccagcatctttgccataaatcacgtaatcggtcttatgcgaaactgaacccgtaactttggcacctaaagcttgtaattttttcgtaaactcacttctagtataatgctctaatttacctgttagcactacagtcttatccttaaatggattatcttcaatttctgcaggctcatctgcacctaggtaatccatattcaggccgctctcacgcagctcatcaattaccttctgtgcttctggttgagcaaaatatgttgtcattgattccgcgatcgtcatgcctattgtatcgatagaagctatttcttgcacgtctagagacataatctttgccagatttttaaacttttgagcaattaagcgtgctgctttggccccaacatggtcaattcccaatccagtaatcaataattcaactgagttttgctttgaattgtctaaggcagttaacaaattattgatcgatttttccttaaaatgatcgagttgtgctaaatcatctgcagttaagtgataaagatcagccacattatgcactaaatctttagcaatcaattgtttaacgatctttggccccaaaccggcaatgttcatagctggtcgagaagcaaagtgcgtaatgccctcctcaacttgagctggacaagatggattgatgcagcgcaaagctacttcatcttctaggtgaactaatttttgcccacaggatggacaagtcgttggaatctgataagctacagaatctgccgatcttttagccatgacgacttcagagatttctggaataatatcgcctgctttatgcagtttaacggtatcaccaatcctgatgcctttttcattcaaataatctgggttgtgcaatgaagccctagctacagttgtaccagctagttgcaccggatccatgaccgcagttggagtaactactccggtacggccgacagtccaaacgatatcccgcactacagtttcttgttcttcaggtggaaatttataagcaatttcccagcgaggcaccttaacagtgttgccgagctcttgttcaattcctagatcatcaatttttaacacaatgccatcaataccatatgttaggctgtttcgtttagctgtgtattcatcgataaaggcaaaaacttcatctaatgtttttaacttacgaccggtttcattggtatgaaagcctaaatcatgcattttttgaattgcttggtgctgactagtaatttcttcaggcggattaacccaagtataaataaaggtactaagttgacgcttcttggtaactttaggatcaagttgacgcaaagaacccgctgcagcattacgtggattagcaaaaactgctagaccttgctcttctctttctgcattcaacttggcaaaggcttccttgctcatgtaacattcaccgcgcacttcagttgttaacggttcaggcaaagtctgtggaatatcactaatatacttagcattagctgttacatcttcaccaacataaccgttaccccgcgttgaggcacgaaccaacttaccattttcatattcaagcgatagtgataagccatcgatctttaattccacgttatattcaactggatgaccaactaatttttgcatccgttgatcaaaatccttcagttcagcttgggaaaagacgtcccccattgacagcattggaatcgggtgctctaccttggtaaaatcactatcaatctgtcccccaactctttgggtaatggagtcgggtgtcacaatctctggaaattctttttctaattcaagcaagcggttgtagctttggtcgtaaacattgtcttcaacctcaggcgcgtccttagagtaataggcctcagcccattcattaagctgttttctaagtgaagccgcttcttttttagcttcatcaagagtaatttctgccatttttccctcctgatccaaatcaatctttctttaattataccttcttaattggcgcaaaggcagccaaaagccgtttgattcctttaccagggaaagcaatatccagctccatatcttcaccagtgccattaactttagttacaacaccatgtccccaagctttatgctcgacttggtcgcctacattccagcccttcttttcagcaccgatagcgcctgaagctttcttagcagtataaacttcagcgcgagctcgttcggctttgcgagcaaatggtgccgtctgcttctcaaagctagattggataaagctgctttgtaatttttcattttcttctttgtgcagatcctgttcatcaatttcgtccaagaatcttgaaggcggattattttgcattctgccatacatcatccgtgagtaagcattagttaaaaacagttcttgcttagcccgagtaattcccacgtaagctaggcgccgctcttcttctaattcattgtcatccatcattgcacgttgcaacgggaaaagcccatcttccatgccaattaagaaaaccactgggaattctagtcccttagctgcatgtaaagtcattaaagctacttgattgtcatcttcatcaagatcatcttgatcgctaagtagagatacttcagccaagaagtcgcttaatggattagactcatcttcttcgggctcataatgatcatcaaaacgcttagtaactgacaagaattcatccaagttttctaaacgcgtttctgattcaattgtattttcagctcgcaaggcatcggtataatcaaaatcagttaagattttttcagttaaaccagttactgtaccattttgagcataagtaattgcatcacgtaatttagtaccaaaatcgcttaatttcttggctgctctagtattaattgaactttcagccacatgtcccatcgcatctaaaatgttgtagtgattttcatccgcaaatgttatcaacttatccacagtagcggcaccgattccccgctttggagtattaataattcggttcatactcatcgtatcagctggattagcaactaacttcaagtaagccatcacatctttaatttctttgcggtcatagaatttatgtccaccaacgatttgataaggaatattgcttttaacgaaagcttcttcgactgttctagactgagcattagtccgataaagaattgcgaaatctttataagcccgttttttatctttaacttcttcttggatctttgaaatgatgtagtgagcttcatcatcaccgctttgggcttgatagtaggttaccttttgcccatcaccttgatcagtccacaagttcttagccttccggttctgattatttttgatgaccgagttagctgcggacaaaatgtgaccagtagaccggtaattttgttctagcttcacagtcttaacatcatatttcttgtaatcctgctcaaaattcatgatgttttccatattagcaccgcgccagccatagattgactgatcggcatccccaactacacaaatattcttgtattgtgcagccaaagcatgacagagttcatattgagcctggttagtatcctgatactcgtcaactaaaagataacggaacttgttttgataatagtgcaaaacttcgctatcttttttaaacaaaactagggtctgcataatcaaatcatcaaagtccataatttgatcacggcgcaatctacgttgatattcttcatacaccttagccgccatcttctcaaatggtgacgatgcactctgcataaaagcttcaggatccagcaagtcattcttgccattagaaattgcggctaaaataccgcgtggatcatacatcttaggattgatattcaggtctttttcaatatgcttaaccaaagttaattgctcggccgaatcagcaattgaaaaattatgaccataaccaatcttatctgcatcccgacgcaagatccgcacacataaagcgtggaaagtcgacatccaaatgtcgttagctgctggccccagcaacttttgctcacgctcacgcatttcactagccgccttattggtgaaggtaatggctaaaatattccaaggtgcaacatgattttcttcaactaagtaggcaattcgtctcgttaaaacagaagtcttacctgaacccgcaccagcaacgactaataaaggtccttcagtggtttctaccgcttctttttgttgcggattcagaccagctaagatagatttttcgctcattattttccccttcactaaaaattatttcattaatgcaacttgaatattataccaaaaaagcagcgactaattcgctgctttagatttacttatcatatttttcaagatcaaactgttcaatcaaattaatcagcttatcggcatagtccggatcagtcgcatagccgtcggtaaccaaagctttagcttgtgtcttataatctttggatgctagaacatgcttatactgatcgtggttccacgttgtcccattctggaataatctagcgtgagcccgaatagaagcctcatatgagtcatatatttggaaacgcgccttcacggtaacccacttattctttacatattccttagttgtcatcactgccgaagtgttcgggttggatcctttaacaccaaaaagattattgtatttttgcgacaaatcactttgtccataattactttctaggcaggcttgagcaatcgtgatgcttggcaataagtcatacgacttgtccacttcgcgcgcaatcggaccaatttttttgataaagtcttttttctgttttaatagttttgctgcttcctgttctttttgcagctgtgcttgtcgaatctgctctgattgaatcgcgtaacgcctataatatctaaagccgacaaaagcaaccatcagaataaatagaattacgaatacacgcacaacggttttgacactttttggtactcttgatttacgttttcttgccatagttttattccctttaattactaattaaagtataaccgatttttgagtaaaaaaaagaagtcgctcactgcgactcctcaatcagtgcgggcgagaagactcgaacttccacgatctaaagcgatcacaagatccttagtcttgcgcgtctgccattccgccacgcccgcggcacatcaactataatagcctaaatacagttgagatgcaagaaaaaatataaattattttaaatttctgatcattttacgcaaaagtttgcgctaaacgcaggtgtcccctacatttaccacaacgatacttttgtgtattaatcctgcgcattcttggatatctcaacccacagttttcacaaagatataggtaacgatattttttctttttacgtaagccaatatcaggtgcataacgactgcctccaacttttttcagcaagattttaaaattgcgatcacggtgtcggtaacccaagcccaataaatgcaaatgatagtgggttaattcatgcttaatgattcctactagataatcatgatattgtggtactaaaaaatgcgcgttgatttcaagatggtgatcatccaaatgataacgcccacctgttgtggtcattcgccgattaatttttacacggtgcttaaaagggcgatcaaaatattttatcgaaatttcttcaactaaattttgtaattcattctcattcatggataaaattttattccaaaaataaaaatcagcaagaatttaatctcgctgattttttgctacctaaatatcttggcatacatccccgcctgcttaggcgtactaatgtgtcgtttcaagaaagttactaagtcatgtttgaatgactttttaccatccatccaggttccagtgaataagtgaatcgatttggagtccttagaaggattacacagaactccatctgaatagacatgaatgccatcttttaacacttgctcctgattacctagctttaagccatacttatttaccagcatttcagtaacggaaatactatttactcccgccatctgattcttagtgtcatattcaaaatcacgatcttgataataatccaaaatatcctgcataaatgggtggcctttttctgcaccaaaaattgcagctgacagataatcatggttttcaaaaccaataaaggcagaagcattcaaaagactatctaacttatccacgactctaacatcagtatctaaatatatcccaccttgttcataaatagcccgtgctcgaacatagtctgacacgaaggcccatttttttgcagcataagcttgttcaatataacggttctcatgcatatcaaaattatcttcattccactcaataatttgataatcaggcaattttttcttccaggttgcaatacattcttcaattatcggggatttaggattgtgtcctacccaaacataatgaatttttttaggaatcatttttaacctcgcttcaaaaagttcttaattagcttcacaatatcatcattaaaatcaagcttgaacaagaacatcaatgtcagataaataattaacatgacaattgacttaaaagccatattgaaaaaggcagacggaattatattaggcataaacattccaatagccaaggttagcaccgcaactaacaaatacttgggcacgtcatggaaaacataactaaattcatagccatcacgtacaacccagagccgcaaaattaaaactactgcttcagtaattaatattgcaatcatagccccaactgcgccatatggcctatctaagagataactcaagacaatttctaaaattgccccaataactactggcacagcataatccttgtctcgctggttagccaaagcaaattggttagcaaataccccgccagtcggaatcatgataattgttaaggtaaaccaaaacattaatggagtcatcggaacatatttattaccaaagaaaaacggtacaaactgcttggtatttgccataataattacggcgaacaaggtacccagcattacagtagcttccagtgattttttcatcactatcttttgtgccttttttccttcgctcgccatcttaggcataatgactagcgaaatactggtaattacacccagaatcatatttgaaattcgttgtgaattgtcataaaaagaaacctgagtcgaattagaaaaccaacccaaaattggtttatccagcgaagtataaatttgagtcgcaatctgtggaatcatcaaagtaccaattgcaattgccgtctgtttaaatttgtaaaaatgagcaacgggttttcctacatagcgccaaatatcaaaccaaaagacaaaggaacctagcattgtcgacactgacatgatcaataaatatttccacaagtcagcgggtgattttacccataataaaattagaaccacactaactaactttaccgccatgtttttcaaaacaacacgaccaaagtcagccagtccttgaaagaaccatgaaatatcaacctgtgctgagatcaagtatggcaccatcaacaagatataaaaccaatattgaacgtgaaatacagtcgctacaaaaaccgtgactaaaatggtgataataccggcgattccttggaaataccataacccccagaaagcattggttagctcctgcggtgtaccataagtgcgcgtccgtgaaattgttcgcatccctacatacgacacagacagaatacaaaaaatcatcaagaattgcactgtattgttcacactgctataaatcccataagtcttaggacctaagacacgcgataaatacggtacagtaatcagtggcaccaatacaataaaaatctgataaaccgcattatataagatgtttaaaaatgttttacgcattttaacctcgatattcctgcgtcatgtacttaaagacgttctcacaatatgaatcaccatgcacctggttagtcaaatgtagccagtaaagacggcgattagcaatctgctggttatcaagttgatccagattgcgaattagttcatcctctgaattaacacagattccgggagtaatctcagcatatggtcccattagtaatccgcgcgttttttcatattgctctaaaaagttagtcacaaacacaatcggtttgttcaagtgcaagtaatcaaagtagattgacgaaaagtctgtcatcaagaaatcagtatcaccgagcaattcgtacaaatcataattgtggtcaaacaagtaatcattgttcatgaaagcaatgttagaataactgctcttgaaattggcaaataagcgcatttcatagggatgcaattttacaatcagatattgatgccgcttctttaattctgtatttaatttttcaacatcaaaatcccgaaaggcaaaaaagtttctctctttgattttctccataatggatttatcttccaattcataacgaaaagttggcatatagatcccgatctgtgcctgatcgtcctcagttttaaataagtcagccaacaattgtttcttcgaaattaccggcttagccaataaatccaaacgcggaaagcccagcttgcggtatttttttgtctcaattgccatacaagcactcattagtgattcatatagatcagagctagaagcaacaatatccgcattcttgtgccacaatttttcgttacggcgattgtcgcgtcgcttagtattattagccataattcccatgcgcttgagtggaacgccatgccacaactggacattaatttgatgcttgcgcaccttaaatggttggtgcgttgtaattacatatcgcgctgctccgattttctgccaggttttccacttcaagtgtgacgatggccacggctcaactaatgtaacgttatattcaggatgattcaattgcagccacttgtaaaaagcatagccgttagatccagacctacctgaaccattcaggataaccacattattgttttccatcgtggtaaatctagccaaaaaactcatccaagccaaataaagacggaataaaaagcttttcattaaaatacttccttaaaatagtctaatacctaaagcatataaaaaaagcttgagcaaactcaagcttttttctttatttttgttaaactttattctttacccatttttctctggcagaatttaacaatttcaacaatcaaaaccatcaaaattccggcaattaagatgactaaccactgtggtccatcaagttcagtcacatcaaagaacttagtcataaatggcaattctaccgctgccataattacagcagcaatgataattgcaccattgaaccacttgttagaaaaagtatgcggtctaaaaatcgactgatgtacatacttggaattaattgcatggaacagctgaatcaagcccaaagtcaagaaggccattgtcaatgcatccccatgttgcaacgatggatcacccacatgtggaccgacatgcaaaccaatttggtatgcacctaaaactaaaattccttccaaaattccttggtaaataattgaactggcaacaccaccgctaaagaagttagacttcttaccacgcggcttgcgcttcataattccaacttccactggttcaacacctaaagcaatagctggcaaagtatccgttaccaagttgatccacaagagctgcacaggagctaagatatcccaacctagcattgtcatcatgaaaactgttaatacttcacccacgttacaactcattaaatatagaatggccttttggatattactgaagaccttgcgtccttgctttactgcttcaacgatcgtggcaaagttatcatcagccaaaaccatatcgctggctcctttagaaacttcggtcccagtaattcccatgccgattccgatatcagcttgcttcaaacttggagcatcgtttaccccatcaccagtcattgcaacaatcttgtcattagcctgccaagccttgacaattctaaccttgtgctctggtgaaacacgagcataaacgctgtagtcaccaacatgctgtttgaaatattcatcatctagtttatcaagttcagccccagttaaaacgcggctatcctgacctttttcaataatacctaggcgttccgcaattgcttgagcagttgtttggtgatcaccagtaatcattactgttctaataccagcactctttgcttcagccacggccgctttagcttcaccacgttctggatcaatcattccgactaacccagcaaaaattaaatcttgttcaacattatcagttgttagatcggtgtacaattggtcgactttcttataagcaagccctaagacacgtaaagcttgttgcgccatctgcttgttttgcgctaaaatattttgcttctgcttatctgtgatcggctctacttgaccaccattttcaatcctagttactcgctgtaacaacatatctggtgcgcctttgaccgctacaaagtattgctcgccatctttattaacagtactcatcaatttccgttctgaatcaaaaggcacttcttgaattcgtttgtatttttcaagcaagtcagttacatcaatgttttgatcaaaagcaaattgaatcagggcggtctctgttgggtcacccaataagtctccgccattttcaatcttagtatcattagccaaagtcattgccaataaagctgggttattttcgctaatactttcactattatcatgtaactttttatcatagaagaccttttcaactgtcatccggttctgggtcaacgtaccagtcttatcagaacaaataatgtctgtagcgcccaatgtctcaacagcaggcaatttacggacaatcgccttatgtttggccatcgtttgcgtacctagtgccaaaataatcgttacaattgctggcaagccttccggaattgcagctacagccaaggaaacggcaaccaagaacatgttaatcattaaagtagagttacgctctgctggatcagccttgagcactcctacgataaagacaataacgcagattgccaaaatcatgatggttagggtctttcccagttgattcaagtttcgctttaacggtgtatcagtttcatcagcattgttcaacattgtagcgattttaccaacttcggtgtgcattcccgtactagttacgattccttcaccacgaccataggtcacattagtattggaataagccatatttacgcggtcagctaaagcaatgtcttcaccttctaaagtttctgcatgcttttcaactggaactgattcaccggttaacgctgattcctcaatcttcaagctgtgggcttgattcaagcgtaagtcagcaggaaccacatccccagcttctagtaaaactacatctccaggaaccaattctgtgcttggaatagtaacgattgtatcatcacggcgcacatgcgcatccggcgtagccatttccttcaaagcatcaatcgcagcttcggaacgtgcttcttgaaagacgcctaaaattgcgttcaaaatgaccacaatcataataattgcggcatcagtccactcatgagctaataccccagacaaaatcgcggcaatgatcaaaacaataatcataaagtctttgaattgatcaataaaacgcatgaacatgctttgctttttcttggaagctaaggcattcggaccatattgctctaatctagctttggcatcactagcacttaacccatccttaacggacgtgttaagatctttttcaatgtcggggatcgactcgacataatattttttcgccattttccctctgctatataaaacatagaaacatgcagaagtttgatattttccacataccagaaaaaaatatatttttcctttcctaattttatttactgtcgtcatcattggtattccgatattccatctggggagtaatcgcattgaccaactcctgcagcttaagggtttagccagccccattatcttttattttgttaatgccaataaatttaatactgcattgtcatcacgatcattgctatagccacactcataacaaacatattcattgtgcttggtgccatgttttctattgccctgcaaagtgattttgtccgcaccatttttgacatagccgcaactagcacatctttgcgttgacgggtagcttctatcagccaaaattagctctttatcataccaagcacatttataggataatatctgtctaaatttgccaaacaaggacctctgtatgcctttggaagccacatgcgtcatcatcatttgcttgacattcaagtcttcaatgacgatttggtcataattatttgccagctcagtagtaaatttttgcaaaagatcattctgaatattgaaagccctgcgataatcacgctgaagcttggttctcacttgcacgtaattattgcttcggccagccaattttccattaactctttttttcttggccaatattctctgataatgcttgatccgcttgtacagtttctgcagtcttgccggcaaaatattgattctgccctcagtatagctgaagtgcccaacgttgacatcgatggcggtctttttgccagttttaacctttattccagctttttcttcgtaggaaagagcagcgtaataatggcctctttctctaaagatgctggcaattttaacctgtttcatcctcaatgcttcatatgttggaatatcaaaccatgatttaattcctctgggcttatccagtctgagcttgccattaataactttaactcggtcagtcttaaaaccttgacgtggagctttctttgacttgaaatgcggcttgccccagtcgagctgggctttgtcaaaaaagctcttccaagcgttggccaagtccttgactgccaactgcagacaacgagcagacaaggcaaactgccaatcagccttgttattgactaattcatctcgcacccgacactcattaggactaggattattatccttatttaaagtccgtgcttcatacatatcttgccaggtttctaaggctagattccagcagtatctgcggtaatcgcatagacggtcaagttctctttgcatggtcttgtttggttttagctcagctacctgtgttttaatcatttatttcacctccaatgcaaacataaatttagcaaaggatgaaacaaaaacaagcgaacaaaatattaaatttttagcagcagctaatttgtttctatgttttatcttcctgatcaaattaactgcatctttttctatttattgctatcaaatcctatcttttagtcaatcattatttcctcctcaaaaataaaaaagagacttacatgcttgtagcacataagtctcacgaattaagataaatccagaagtatcttacttcggctgttggattcatcgcaagcaattgctgttactcccttatgacaagttaattataagcaaaattttagctatctacaagttttagcgaattgcttttactttttataaaagtcatcaaagacagtaactggcaaatgacgcttgtgtttactcttattccataatttttcaatttgatcagctgttttatctgatacttccttaccttcaaggtaatcatcaatctcttggtaagttacaccgagggcaacttcatctggcaaatctggcttttcttcttcaaggtctgcggttggagccttttcatataaatgcttaggacaacctaattccttaagcaaagccttgccttgacgcttgtccaaacggaacaatggcgtcaaatcagcggcaccatcaccaaacttagtgtaaaagccactaaagttttctgcagcatggtcggtaccaacaacggcacccttattagcaccagcgatggcatattgaactaccattctttgccgcgccttaatattgcctttgttaaagtcagtaatcttttgaccagttgcttctacaaccttcaccatagcatcaactggttccttaatattaacaattaaatcctgatctggcttttgaaaagcgactgcatctgcagcatcttgggcatctgcttgaacgccataaggcaaacgaacagcgataaattgataagaatcatcgccagtttcctcacgcatttcttcaattgccatttgacacaatttaccagtcaaagtggaatcttgaccaccagaaatacctaagacgtatgacttaagaaatggattagcctttaaataatctttcaaaaaatcaattgaacgtctaatttcttttttagggtcaatttctggtaaaacatgttcataagcgataatttctttttgtaattctctcatcgaccaatgcttctttctctaattttacgccgaatgtcttgaatcaaatccatcttggattcgtataagttttgtgataaatccactggatattcctgcggattcaggctacgcttatattcatcccataaaccatcaaggttgtcagcacagaattttttaatttcatcaagactaggttgatcataaactaattttccatctttaaaaatatcatgtaaaagtggaatagcagtgtaatcagttaccaccttattaatatagttatattgtgggtggaacatgaagagcgcgtcaaatttgcgtggatcttcattataccgagatacccagtcaccttcatttttcttagcagtgtttgcgctaatccgccatacttgttttttacctggggtggaaactttgatggcatttgaagaaatcttcaatgtatcccgcatggcgcctaattcatcttccatggcaaccaacttgtaaacagcaccaagggctggttgatcataagcagtgatatacttggtcccaatgccccagacatcaattttagcgccttgcatctttaagttagtaatggtgttttcatcaaggtcatttgaagcaaaaatcttggcatctggatagccagcatcgtctaactccttacgaacttgcttagaaatgtaagccatgtccccagagtcaattcgtacgcccaagaagttaatcttgtcgcccatttcattagccaccttgatagcattaggcacaccactacggacagtatcgtaagtgtcaaccaaaaaaacacaattcttatgtgtttccgcatatgccttaaatgcgtcatattcactgccaaatgcttcaactaaagcatgagcatgagtccctgaaataggaataccaaacaatttaccagcacgaacattactagttgaatcaaagccgccaatataagcagctcgagcaccccaaatggccgcatcggtttcttgcgcacgacgagagccaaactccattagaccatcatctttaacagctaacttgattctagcagctttagttgccaataaagtttggaagttaataatatttaaaatagcagtttcaactaactgacactgggcaagtggaccttcaacttgcaaaattggctcgttagcaaaaaccagctcgccttccttcattgaacgaatagtgagctttaattttagattgcgtaaataatcaataaagtcatcatcgtaaccttcattttctttcaaatattgcaggtcactttcggtaaactttaaattctttaaatagttaatgatgtgttccaaaccagcataaacagcataaccgttgccgaatggttccctgcggtaaaaactttcaaaaacggcattgcgatcaacaatccctttcttgaaataggtatacatcatattaatttcgtataaatcagtgtgtaaagccaacgaatcgtctttggctaattctggataaaacattgcttctctttctgtcattaaaaattaacaatttcgtttttcattatacagccattacagtccattggctattctcaaaactatttttacctcaaagttaaatacactttttcaattgagtccagttgatttttaatagaaaaatgctcttccgcataccgcttttctgtattagccatctggcgtaactcttcatgggttttattaacggccagattaatctctttagcaattgaatcaatgtctcccgttttagcaatgaaaccatattcgggtcctggaatcattttatgaatatcacctacatctgtggacaaaatagggattaaattgtctgttgcctctaaaagcacaagtggaaaactctctgaatatgaagttaggacggctagatcaattcgcttatataatccgctcaattggtgttgagtcataaaaccgtgaaaagttacttgtggtgccatgtccaattgccgcgtcaaggccttcaatgcttcaagctgactaccatcacccgcgatatgcagacgaatatgctgatcatctaattttttcacagcttttaagagcaattcttgtcctttaaccttttccgtacgagcaacgttaataatattaaaataggtatgttcatatttagctggaatttcactatcactgtggaaaaagatgccattatagatgacatgtaccttgtttttatccacatgtgcgcgattaattagtagcctggcaaaacgctgagttactacgaaaatacaatcagcttttctcaacgcacgtaaattaagtttagtaaaaatattgccaatgattcccctaccttcaaagtctagataaggatctgaatgtacagtaatacaccaagctgcacgaattcgcttgtgaatcaaagataaaaataagttggcacgcgcaccatgagtatgcacaatatcatagtgcccctcattgataaacttagtcagtctacctaaactgcctaagtcataacgactattagctcctagcacatgtgtagtaatcccagccgctcttgctgcttgtgctactggtccttctgccagcgttaataattcaaaatctttgccttcatttttggcttcagttaacaaattaacaatatgtgataaaccgccgccattttctaaaccagcatttacatgcaaaaccttcatcttagtaaaattattttcccttcttttttgactgtttaactcgcacaacaaactgtggcaaaactaacatccgcttaaatctgctaggattagtaatcaagcgataaaaccactctaaatgcgtcttttgaaaagcttctggtgatcttttaacgatacctgaaaagacatcaaaactgccacccacacccatcatcaaagctggtgtttcgttcttacgtaagattgatagtagtttttcttgcttagggaaacctaatgctgcaaaaaccatatcgggttgtgccttctgaatgcgccgtgccactagttccaaatcttcagtaaagtagccgtcttctgcaccaactagattaatatttgagtattccttagcaattttgctttgtactgcatgaattacttgtggcttagctccaattaagtaaactcggctaccacgatcgttagcaacatccatcagccaagtaaacaaatcatatccagtcacccgctcaggtaacggctgcttaagcattttagctgcttttacaatgccaatcccgtcagcagtaatataatcgggatcattttttagaattttcataaattcaggattctcgtttgccgccatcacaatctccggattagcggtcacaataaaggtcgacaggtgattatttagtcgattaataaattcattttggaattggttaaaagttttattatcaaaatcaacacctaaaatattaactttgctcattttcacacctcatgcgttttcttatctagtttctattctaccattccgacacgcaagtacgagaaacatgttgtaagtgtcaatgtttttgcggtagcctttaaaccattagtctaaccttaatttcttaaatatttatatgacttaaatttctgcttagcttgcttaaataactattgccagctacctgtgcggttaatgcgccatgctggatgcctaaatgaacttcatgacgcttctttaagctgtcacgggccgctgcttttaattcctgttcagtcaatacagttatttctgaatcttcaaactcgctgctaagccaaaatgccagctctcgattcttgatgcagcttaagatcctaagcatgccttctgctccagattttgaccatttcttgctttgccccttaacacggtaggtatacttgcggtggttgctctcgcagcagccaatggctttagtcacagtcagttttcgtttcttaaacggcttaatatcgtcccaatgacgatcaatataattccttaggcgccccagataatcatgattgagctcggtattcaattcatcaattagtcggctttctgcagtggttaggatagttttaactttgtcatatctgtatttgtattccaaagcagaaatcagcttgccttgcaggtcaggcgcaaaatatagcctttctttgattttcttatttaggtgaaagacatccaagaaatgctcatgacgcttgcatagccctacaatgtcatcgaagtctgttttggcatatccagcaccgccatcggcgttgctaagaattacagtatcagaaagatcataagtattggccaggtactccttggcttcgttcagcgcatcaagtcggcttaaagaaacaaattccttggcattgattcgctttctgcgtttcttgcttatattgacaatgccttcacagacctgatagcgatgaaattccaaccggcttttagtgcctttgatcaccacgccatcgccttcaagatacaaaactgggacctttttcttagtgcctgcggcatcatatcttgaatctgcttcttggcccgctttaatatttttcccggccatttttaccaaattgcccacctgcatatggctaatattaaagccagacaggcaattgactgctagagcagtattgcgataagtggcaacgctgcttacttctaagatgtttttgactgctaaaatactgtagcgcttgtatttgtcaaagcccattaattcatccaagggataccttgcttgtttgcctgggcagacatatcttcttctgacatacctaacttcgccaaaagccatattgattgagcgctcattcttcttatcaatctgatagccctgtgctttaaccttggtaatcatttcatcatcaactttagctaaagccaaggccatgatttccttaatcaggtttaagaagaaacagattatttttctttcacgcttaatataattatcttcagactttataatatttgcgatttcagttacaattgaattcataaaagaccagcttctaatgtgttttttgttcttaacatcagactactggtctttttgtttgagctcaagtccaaattcaaaggacttgggcttttttaattatttattcaacttaccgtaaaaaattatacacttagaaacatgttcaagttttatattttattcaaacatgataagattgttttaataaaggagaaaaaatgaaaagagttattacctatggcacctttgacctacttcactacggtcacgtgcgactgcttaaaagagctaaagaattgggcgactatttaatagtaggtttatctaccgatgaatttaacgaattcaaaaaacacaaggaagcctacaatacctaccctgaacgtaaatacattttggaagctatccgttatgtcgaccaagtcatccccgaaaaggattgggatcaaaaaatcaccgatgtacaaaaataccatatcgacacttttgtcatgggcgatgattggaaaggaaaattcgacttccttaagccttattgtgatgtggtttacctgccaagaacgccaggaatttccactactaaaattaaagaagatcttaaataaaaaaatactccaattccattcaatttgaatgagattggagtttttgtttacttagaaaaagtgaattcaaatcgttctgcaacgtaacgtgcgcgggtgtattcgaatggttgcccatctgctagttcagttacctgtcgtctagtaattaacggttcaccttttttagctttaagaagacgcgcatcttgctcgttggcaattgatgcagaaatatgttccgtcactcgtccaatggcaaaaccaccgcgcttttctaaggttttatataagtgcgttgaaacatcttctttagaaaaattctttactaagtagtatggcaccgttacgacttcataacaaattggtgtcttatcagcgtagcgaatccgctccatccgcaaaacgttctcattatcttttagcgcaagacgctctttttcagataaagatggattgccaatctgataagaaattaacttacttgaaggaacttgaccattagccttagtaatctcagtaaaggacataattcctgacattttttcttgaaccttttgactagctacataggttccgctacccaagcgccgttctaaaattccttcatcttctaatgttttaatcgcttggcgtaaagtcattctcgaaacgccaaacttaactgccaattgacgttctgctggaatacgatcccctacttgataaacgtgattctcaatatcacgcttaatctgattgtgaatcttgatatacatcggttcttccatagtcgccacccccaaagtttagtactgctattattataatctaaattggtctagcttgcattaataacactgcttcaattttacagactattttttcttagcggtccacttcactccaagaatataaacatttggacgcttgttatattccacttcaacttgttcattatcattagcaactacactggcactaaattttgcttcatctttaacagctaagttagcctgattaggattcagcacaatattgtggcccttcatattagcttcaccgctcaaagctaaaaagtactcatagttcatatttccagtgaaggtaacacgtgtagcatcacatttcgcctgatcttgaaaatctgcatgagctaaaattacggcattgttcattgtaacttttgcttcatcaactactatcattcgattgatggttgaattttgaatgattgtccgtgtctttttatcaatataaaccccacccaaaaaagtagaattcataatattgctccagcagtcatcacttaaataaaggcaggaatcgctagcagacttaacttttgaattaagcatattcatccaagtttgcccatgcagtaatacataatctacttccgaattattaagatccaactccgcattcgttttggcaaaagtattaatactgccgtgaatctttgaattatttacaattgctgttccttcgccttcaattgccaaagcacaatatttgtccgagaaataatcaatttctgaatcattcatttccaaacggaaattggcatggtcatacatggaaactgaaccgttaacaattttggttgaataaagttccaacgtgatcttaccattaaccgcgatagctgctgtatcagttcccgtgcccttaataaagcaattacgcaaagttaaatagccatcaacgcctactggtacagctaggctattatgttcggtagttgtatcaatgcataaattttctaaagttacataacgactatcttctgaaacactaatatagccataaatagtcgtgtcttctggcaaagagcctgttcccttaattgtgatatctgttagtgtaatgccctgcggcaaataataatatccggggcccagcatcaacacatcatcggcacgcaaatcctttaaagcctcgtgccaactgactgaactgctagatccccctactctaattatcctagccatccattatcctttcatctcgtaaaaaccgattactattgtactaattttcttcaatttatgttgtatttttgctcatcaaaaaagctaggttcgattcctagcttcttatactatttcattttaacattccagtaataagccacattaccataaggagaaagttgaaaacctttcactctcttattcaataagtatgacgtaccttgttggaatagtggtgccgcaaaggcatccttttgaattaattgtttttcagcgttaactaaggcattcaatctcttctgcggatcagtggcataagttgaacgagccaagtcaatttgcttccagaagttagcattgtgataatctggcgctaaattaaacaaaccaccaactgtcaagaaatcaattggatcttcataacttggctgccaagttccgtaaacaaagtcgtaattgtgattagttgtgttagatagccgtgacttcaaaggaattgaccgtacccgtagagttagaccaggtaaatttttcatcaaattgctttgaataaattcacccacacgcttagcatcgtcaatatctgaagtaagcaattctaaggttagcttcttcttacccaattgcttcaaaccaagttgccattcctttttagcttccttggcattataggtaaccaagtcgccagcatccttgcggtaatcgttgccagttgcctgatcggtaataaagtttgcggcaacaattccatttgacaccttgccttgatgcaaaacggtcttgactaactgttgcttattaattgcccggctaatggcccgacgaatatgaacattgcctgtactcttacgcttcaagttgaaagaaagataaccattagttggcgtaactttggtatgatagctagaattattttgatactgcttaacaaaatcagaagtcaatgtcgtgtaatcaagttcaccacttctgaataagttaaccccagttgaaggagtttgaaccacttgtacgttaactttattcaaatcaacaattttcttgttccagtaagttggatttttcttgtaagtccacttcaaatttgaacctgtccaaccagatacggtaaatggaccattgtaaactagattcttactgctagtcccatacttagagcctaactttttaaccaatttagaattctgaggatagaattgtgcaccctctaagatttgtggcaaatatggaattggattagctaatgtaacttgcaccttatacttgccgagtgctttgattcccaatgaatttaccggtgctttaccttgagaaattgcctcaccgtttttgataatggcataagaatcggcatctaaagatgaattttttgggtcaacggttctgcgccaagccgttacataatccagggcagtaactggatcaccgttagaccacttagcattattgcgtaaggtaaaagtatagaccttctggtctttagaacgttcaacttttgtcgcaccagctaattctggctgatttttcttattaaaacggtaaagaccttccatggaattctgcaaaacttctgaactagtcgtatctccatacttgctcgaatctaaagttgaaatttcatttgtgacagaggtattcattgtcttagtcggtgcagcattactgtcattgttagagcaagctgccagcaccaatgcggcagctgctgtcatcactcctgaaaaaatccattttttacgtctcaatcttctcacctttacttactttttgtttaatacttacattttacaagtatatctaatacggaagaaatttcaaatactttttccgtataatagctataatcaatacgtatacaaaaatggcaaaaaaagaaacgtcacataggacgtttcttttttcgggttgggtgttcttttagaactattgggttagctggattcgaaccagcgcatgatggtaccaaaaaccattgccttaccacttggctataacccaataccagctgaactttttacttgtcgttcaacaatggaggagggtggattcgaaccgccgaactcagagagagcggttttacagaccgccgcgtttagccacttcgctactcctccgttagctgacttaattataataacgaaaatccaaatcaaatgcaagacttttttgaaacttttttcaaaaaaaagaagaagccatgacgacctcttctcaaaatttaaaaattgatttatatctaaacagttaattttaagcctaatgccttttgtgctacttgatttaccagactccattgcttgtcataagttggtgaaaagaagaaatctgcttctgctaaatcttccagtgtcaacttatttctaatagctaagctcaaaacattggcttggccactaatgtcatatgatgaaagtacgctaccgcctaagatttggtggctgtcttcattataaacaacagcaatatagcaagtaggattatctttttcaggaatatagtctggacgaagataactctttaagactgtttcttttgcattaattcctgctcgcttggcattcttttcactgagtcctgttgttactgcatgtaaatcaaaggcttcaagcaattgtgcaccaactaagcccttaaagacacgttctggcttgtcttcaaataagtgctcaacaacatattgagcctcatgccgtgcagcaatggcagatggcatcggtactcttctgttagctggaatgctaaatgggaagattgcatccccaattgcatagacatcctttacattggttctaaagtaattgtctaccttaatgtagccattgtcataaagatcgatcgtgtttttcaaccaatcagtatttggcttaataccaactgtaataatgacacaatcagcagtaatatcacccttatcagtctgaactgcattgacctttccattgccaacaaagccagtaactttagtgttcatagccaggttaacaccatgatcagtcaattctttttcaaataagctagtataagtatcattcaaataattttctagtggtttttgcccaccgtcaattaaagtaacattcttgcctgctttagcgaaaacctcggcagctgcaattccgttaccagcaccaataactgcaacatttttaatagcttcatcttgagcagctgcattgatctctgtagcgcaatcatagcctctcatcaacataatatttttcaggtctgctccaggaagaggcaaacttgcggggttaacacctgaagaaataattagcttatcataactaacttctttggttgtaccatcttttacgtttttgacagtaaccgtctttttagctggatcaagagctgttactgctgtgttattaacaactttaccaccccgttcagctagatcttcaggagtaaagtttctaacgttgtcttggcctgtagtttttccttcaaggaatagcttcattccgcaagacataaaggaaacgaagtcgcctgcttcataaatcgtaacgtctacatcatcataacgatctaaaatttcataagctgcctcttggccgccgtgggatgcacctacaataatgattttcttttttgacatagcctgacctcctaataatgcagcaataattgtcgtttttaagtaatagcagttattgtaactggttacattatttatcttttaataagatatttcaattaatttgcttttgattagtgcgaagcagcaatatattttttatataaaaaagagcactactgatagtagtactctagagggaaattttccaaaattatcttatttagctaattctgctgatagatttcgttcactaatttagtgatttcattacgattaagaacttcatcatacatatccattgtttcctggattgtattttctaaattagtaccatgatttttggcatagccaataaacttttttgcatctactattttagcttctttaatcgctttttctgcagctcttttagcaacttcattcatctcatattctagcttattcatgtcttcgacccattttccgctattcacgtagtagtcgatatccttctgcaggctgatatccctgcgtagtacatcatccgtttttctagatcatttttacgtgttgtttgcatctcaatatcatacactcgactttgatcatcttgtgcccagatatctaagcgaatgttttgggattctagtccaatgttgccgtcatactgggtaatgacattaacttttgtcaattttaattcaggaaacatccgacgtagcagttccagacaattctttttattgctcataacatgaccgaataccaagtcgttagtaattcgaggatatcgattaattcttctcctcatattttacctcttttctttttcttaagtaggaaaattaccctccactatttattacgcaaaaaagtgcaaatttttttcagaaatttaaaaatttagacacgaaaaaagccgatgcaaatgcatcgactctttcagttaaattattctactttttaatagaagtttacagccttgatgtaacgcttgttgttgtttctgcagccttcaattctgtagtacttcttaccgttcttaaatctcatttgaccaccgtaagtagttacagtttgacctctgtacatcttaccagtacctggagtacgacggtatgatgaccaataaatgtaggcattgtgcttaaaagtacgttggttaccagtaatgttggttacacgaacgtattcgtccttgttagccaccttgtagtaagtcttaccgttgatagttacaacagttggaacgatttcaatgtcgttgtaagcgtagtacatgtgacctaagtagttaccgttcttgtcataagctcttgaatcaaccattactggcaaagtcttggtgttagtgtcaccagctggcttaacaagtgatgaagtcttaacccaaatgttgcttgagttagcatctgacttagacttagttgaaacttgtgagtatgatacattgttaagggttctagtttgatcagcaacgtaaacagtgtcaccatctttgaaagtagttgaagctggtcttacattaatgccataaatgtggtaagttgcgattgagcttgcgccattagcatatagagcttgtttgtggcttgaagtaattaaaacagtgtatgttgcagtagtcttcttaccagttaaaccagtagcagttaaagttacattatagtaacgtcctgcttctgaagtattaacaggatttgaagttgcttctagtgaagcagctgtattattattgctgttttgtacagctgaaataataactggctcaccattactatttacaaaattagttggattaaattgtgaaccaacagctacttggaatatttgaccattaacactccccttgctttgaccattcaatgaccaattgatcactggattttgagtagtatctgtagttgaacttgaacctgaaactacaactgggatttgaacagtagctgtttgcgtagaagtagaacctgtaccagttaaagtaagattgaaatcactagttggtaccgcagtaatattcttgttatctttatcaagagttacacctgcattcttaagaatagcagcaacttcactatctttaaggttaactttttctccactggcattattcgtactaaagaaaactaatcctaaatcattaattgccttagtaacactagctacagtatctttagccttaatagaaatagtagttggtacaacattagctgttttatcggtagtacttgcagcatcaattacttgattgccatatgtaaagtatgatctatctgttggctttgctgttgttgctgtagtagtacttgtagtaccagtagtgttagttactgtacctaaactaatagcagcgttaactggaacagctgaagctgctacaggagcaactgccaacaaagcggcagcagccatacttacaattcttgtattctttctcataattatgtggcctttcctttctgaaacagaaattcatcctaagcagtaagttatatcttcttctgcttgtgaaataattatagcatgttacgaacccgattactaaaaacaggatcgactcgtgtgtgtgattttaagaatacctcctaaaatcaccagtaataccctaccctttatttgttaaactgtagttaccggacttttacaattaagattcaaaacattacatttttgtgaagttttaaacaagttattgatttatgacagaacttatgtgtgttaagaaaaggtaattttaacacttgttcgcttaaaaaaattaaagctcttagattttttgattagaaataattgcttcatgttctttaatatgctcaactcgccctgcatcccccgcaataagtaacaaatataatgcctcaatcattgtcatacttgccacgcgtgagaaataatactgcgattgcatcaccgtctgccgcactgctgtctttaaatgcacatcagctaatagcgcaatcggtgaatcatcgcgattggtgatcgcaatcaccggcatccctttttgtttggctaccttaatttgcttaatgattcccgctgcttcacctgaattcgaaatcaccaacaagcaatcctttttactcaggttcattgtctgcgcaattgccgtttcaatcgtgccacctgaatcaattgccaacaagccaatctgattaaacttatacactgcatcagcggccaccggataagtatcgccctccgcactaacctgcacaattctgctttcagtcaaaaaatgcagcacctgatctaatttggcttcagtcacattctccaaagtcgccttaatctcggcgactttatttttttcaatcaattccaaattagcactagcatcatcacgtgacatattttgaagtgacacactttcagttgcattctgagctagttgaatttttaaatcatgaaaacctgtcaaatctaaattatgacaaaaacgcgtcaccgaagcatcactcacctcagcttcagttgctaattttgaaattgtataatttaccacctgttcgggctgttttaagatcacttgagcaatcttctgatcactggctgacattgtcgctaatttactatagattgtatcgataattttagtcattattctcaccttttctgtgccaaaattatatcatcaatgtaattaattttcacaattttatttttaaagaaaataaatttatattttgattgacgaaaatcatttaccaaggtagtatgtatttgtaaataattttcacaggagaaaataaaatgaaaattaattcgataagtgacctcgctttaagtaaaatcaagccgaaaatgactatttctcttggcggcggaagcaatgtatttaagttatctcaagcgattgcacagcataacttagacatcacattatattctccatccgaacttactcgctttaggtgcaaagaactcggattagagcttcttccatctactgcagcgactaagatcgatattgcttttgatggttgtgacagcattgataagaattttaacgttctaaaaagtttgggtggaattcatctttttgaaaaacaggcagcacaaattgccaaacagtttatcctactcttacccagtcaaaggatacaaccgattctgaatcctaaaattccactttgtcttgaagtggcaccgccttgtgttaatcaagtacagaagtatttaagcagtttacatttaactagtaagattcgacaagatagttcagtagctgcatttgcccgtacgcctttgggcaactacttaatcgatgtttttaacgaagattggcacaatatcactgaacttaatcgtcaactttgtttacaaaatggcgtagttagttcttcactatttgaaaacttaactacttcattaattactgaaaaagacggagaaattattgaacttaagagaggtaataatcatgaaaacatttaattggggaattattggtactggctggattgcacatgatatggctgatgctttgaacaaagtcaacggcgaaatttatgttgccgcaaatccaaatgaagaagcactccgtgcctttgtccaagaaaaacatgtacagcatgctttcactaatcctgatgaaatgattaaggatcctagcattgatatcatctatattgctaccccacacactttccactacgactacatcaaaaaggccctcaatgctggcaagcacgtcttttgcgaaaaggcaattaccgtcaatgcacagcaatttgatgaagtggctcaattagctaaagagaaacacctaatcttaatggaaggttttactctttatcacatgccaatctaccaaaagatgcaagatatgattaagaccggaaaatttggcgaaattaaaatgatccaaattaattttggctcactcaaggactatgatccgcagaatcgcttctttaataaggagctcgctggtggtgcattgctggatatcggcggctacgcaactgcttttgccattagtttcatggatgaatatcctgaaagtatcaataccacggtaaaattctttgaaactggtgttgacgaagaaagcggcattattttaaaaaattcgaaaggccaaatggcagtgatgtcattatcgatgcgggccaagcagcctaagcgcggactggtttcgggcaccaaaggttatttcgaaatcaatcaatatcctcgcggcactgaagctgatattacttacacccagagtgctcatgaggaaagctatgataaggttactgccggggatgctgatcaggcgcttgaatatgaagtcactgattttcaaaagtatattgaacaaggccatgacgaaggcgaattggaaaaatcgcggatgatcgctcacattttaaccagcattagaactgcctggggcatgacttatccatttgataacgaggaataattagttggatttcaaaagggatcgatacataacatcggtcccttttatttgcacttattgcttattttctgcgacatatttttctagtcgtttcaagccttctttgatctgatccatcgacgttgcgtaagacaaacgaatatatcctgctccacctttagcaaaaaatgagcccgcaattacagcaacatgcctcttttcagccaaatcataaataaacttggtatcatcttgttccaagcctgctggaattttggcaaaaatgtagaaggcacctttaggcttaacgcattcaaagcctaacttggttaatccttcataaagcacatcacgccgcttttggaattctttcttcattggttccgcatcgttcattccattgcctagtgcttcttcagctgcatcctgcattggcgttggttccgtcgttgtgattgcttggtgaatcttagccagttgatccaaaatcggcttaggcgcagctaccacaccgattctatagccagtcattgcccaagcttttgacacgccattcattaaaacaacttgatcatgtaaagtcttttccatcgaagcatgtggctgatcataattgagctcactataaatttcatcacaaagaacaaaaaccggcttatctcgaacaacatctgctaaggcatcaagttcatcttgtgaatacatcacacctgttggattggtaggataattcatgacaagcgccttaacgcgatcaccatacttgtccaatgctgcttgcaatttatccggcgttaatttgaagtcatcgtcagaagtgtcgatttgttcaaccgttgcacccatggatagggcatccccaatataaagcggaaaaattggtgttggcaccaaaacaacgtcgcctggattaagcgccgcagtcaaaaagtcgtagatcgactccgttaccccattggtgatcaaaatttcgcttgggtcgtatttttgtccatatttttcagctaaaaaatcggctgccgccttgcgcaaacccggagtcccgttagatggcgcatagtgtgaatggttattagcaatgctggcttcagccgcttttttaatatgctctggcgtgttaaagtcaggctcaccaatcgtgaatttgacgatgtccgaaatcttgttggtgtaagctgcaaaggccaaaatctgccctggcttttgttcaaccaagccttttttcatatgttttgttaagtcgaccatagtttttcctccttatatcgaactaaatcaattcaaatataggagtctttttaatctttgtcaaaggaaatattaattttgatatctaaagtgcacattaaatccaataattaacaaagcataaatactataaatagccgtaacagtcggatacattgcctgatactttatcagcaaaagaataattaaaactatcgccaaaacaatcgttaatattctaaaacgttgaaaatatgacaaaatcggtaaagccactgtcaaaactatatcagttattaagatagtaaaatccaccggatatgatttgatataaaaaaactgaaatattggcaatgcttctaacagtaagaagatataactaataatcccacatattaaaagcaactgattaagtatctttttatagtctttcattaaatcaagaacttctcttttttcatgtaccagtgcttaaccagagtggtcaatgcaatgtacaaggtcaaaagtacaagaactacgagaacataatattctgggatcggaccgaatttcattaccttagccaagcttggaatgtaaggcattgcagtaccgatcaatcctgcaccgatcgtagcgagcattactacgcctgaagagtgctgttgtaagaagggaattgctggatcacgcaatgcttggataaccatttcctgtgtccagagtgattcgatgaaccagccactccagaagatggccataaagacagccttttgccctggagtagcagccacataacttgtgcccacagtacttggacaaatccagaagtaaagcaaggcaaacgtaatgatatcaaagattgaagatgtcggaccaaagaagaacatgaacttaggcaacttctttgtctcccacttacgtggtacttccaagtatttttcaccaactctatcaaatggaagtgacaaacaagatgtcccgtagatcaagtctagaatcaacaattgcattggcagcattggcaagaatggcaagaatgatgatgccactaagattgacaaaatattaccaaagttagatgacaaggtaatcttgatatatttcatcgtgtttgcaaagatctgacgcccaattcttacaccatgttccaaagtacgtaaactcttgtgcagcaagataatgtccgcactcttttttgcaatatcaacagccgtatcaactgagattgctacatcggccttcttcatggctggcgtatcgttgataccgtctcccatgtaagcaaccgtgtgaccattttccttcaaaatctgaataattctagcctttgactctggtgaaagctttacaaagaggctacattcttcaaccatctttttaacttcatcgtcgctcttaccagcaaaatctttttcactataaatgtacttggtgttcaagcctactcttgaagcaacactcttagttacagcagcgttatcaccagtcaaaatcttaacggtaatatcgtcttgctttaacttcttaagcacgtccttaacatcatccttaggtggatcaaggaaggccaagaagccagttaagatcaaatctttttcatcgctaacattgaattcaccggcttgagcaggattgttcttgtaagctaacaaaacaactctcaaaccatctttgttcaaatcttcaatgtgctttaaaactttttctttgtaatcatcagttaaatcgttgatgtgactgccaacttgcacacgattgcagcaagcaagcatttcttcggcagcacccttagttaccaggatacgaccatcgccgtggcgcttgaccacgacactcatgcgacggcgcttgaagtcgaatggaatttcatcaaccttagtgtagtcgtgtttaatttcattaacatctagctcatcgctagcggcatcgatgatggcttggtccatcaaatcgtgcatccccgtttggaagtacgagttcaagtaagccaagcgcaaaacctgtggattttccttcatatccaagttgtagtgccgttccaatacaaccttgttttgggtcaaagtaccggttttatcagtacaaagcacgtcggcggcaccgaagttttggatggagttcatctttttaacgatggtgccgtgcttcgacatttctagcgaacccttaaccaaattactagtaacaataactggcaacatttctggagttaaaccaacggcagtagcgatggcaaacaacaaggcgttgagccagttacctttagttaaaccgttgatgaccaaaactaaaggtgcaatgatcgcggtcattgttaacaataatttagaaatgttcttgataccaacatcgaaattagtttccttaacgtcgttgtttgaaatatccttagccaaacgaccaaagacagtttgttcaccggtggctaaaacaacgccaacacctgaacctgacacaatagttgttccttgatagattacatcaggatagtccaaatattgatccatgtctttttgatcgggcctcttagtcgcaatcttttccacaggcgttgattcaccgttcaaagaacttgatgaacagaacaagtctttagttttgagcaatctaatatctgctggcaccatgtccccagcgtggatattaataatatcgccgacaactacttgcttggtagaaatttcttcatccttttgattgcgacgaatattggtagttacagacaccatatttaagagggcttcaactgcgtcattagttttcacattctggataaaggatgttaatccagaaataatgatcatcgcaatcataatgatcacagtactcaggtccttttgatctgccggcacgaagacgtagtcggtaaacagcgacaccgtcgctagcagcaacaggaccattgtaaaaggagtgaagaatgattcaatgaagaaatgcaatttcgtgttgtgcttcttggtagcaacttcgttaagaccattcttctccaaacgctctttagcttccgccgaagacagaccgtctagcgaactatgtagcgtctttaacgcttcttcgggagtttgcctagcgatctgcttaacaaactctgtatcggctgtcttcttattaatcagcaacttgttttttgccatgttaatcacactttctgattaaacacgcaaacaaactaaaaaggagccaataccaattagtattaactccttatctaagcgatgtttcctcgtcgttcagttttgacactacgtgacgtaagcacaggctagctatctggatctcgccttatctcgacaagaactattttactcgttggcatctctggatgtttccgggcgatagcttgtgttcacgtaggagcctcacctaacagtttatttgctttttcaattttcatttttattatatgcatattatttgacaatgcaattatctttactaaatcgttagaaattgtaaaagaatttaagaatgataaaaaacacgtgtttgcaatgaacacgtgtttttttataatttaattttgatatactattctatagacatggatatgttgcaactatttgtgtttagtagttttagcataactaaccacccctcacacattttgaaattacggcggtgagagttatgcataaacggatagtttggaggtttagtgctccgtggtagcttgggctattgcaatcagcatcgttctaggtgctttaggcaatttagctatcaatttggctatagcctatgcgataacaaaaaaagctaatcgcaaggattagctaaaccaacagttatctgaaactacgatcgaagtcaacggattgcggccgtgggcttcttttcatatacagattataacatgaattatccgaaacgaataaaaaagatcaggctcactgcctgaccttgctattgggttagctggattcgaaccagcgcatgatggtaccaaaaaccattgccttaccacttggctataacccaatcttcaaaccttttacttgattggttctatttgaatgacctctcgatcacccaacagatattagtataggggaatgaagaaaaaatatcaaggaaaaattcaaaaaaattttgattttttcacatttgctcgaaggatactgaatctttcttttatgaattataaaattaatttgtttttttacgattataacttttgtgacttcttaaccttattcattaattcaaagtcgttggtaaaaattccagctacaccaagtttaaagtacctttttgctatgcttactttatctactgtccaaattctttgcgtaactttgctaggtaaataccaatgcggatggatcgctgcaaaatgattcttagccgcaaactgttcaggaaacggcaccggccatttgtttaaaaagcaatattgttggtggggatcaattcgctggcaattttttaaggtttgataattgaaggaagagaaaataatgggatgcacaaaatgatattcttgtgctaacgccaaaacgatggcttcaatcccctcatcatgaatcttgttagtcttaaattccaagttaacatacaaatcctgtccctgaagaatttcaaataattcacttaacatcggtaccggttcaccgttagctaaacgaaatcgcctgatttcacttaaggtatagtccttaatataacctgtcccattagtagttctatctaacgtttcatcatgcattactaccggcactttatctttagttaagtgcacatcaaattcgacaccttcagcgccatgcgttgctgcatatttaaatccttgcaaagaattttccgcaaatttgaccggtaagccccggtgagcaaaaataattgtctgagtcattttttcacctacaaaaaaatgccgctctcgcggcatctgctctattttaatctaagacgattgcaccttgagttgccaaagtatcacgaactagattcttaacatctcttctaactaccataccatcggtgttctcaacgtattcaagatattgagctgacttaatatgtgcatcataagccttgtcatcaaagtaaacttcgacaaaataccattcgttttcgttcttcttattgactccagacatcataatttccatgcctggttcagcagccatgctagtcgtcatttctttcttaacttcatgcgcaaacttttctgcatcttctggtttaacttcaactttaactaagcgcattacaaaatgatctgcgttatcattcaaagcatcatgagcctttgtggtaataacttcgggctttaattcgattacttctttgtctgtggaaatcttgtcgatggtttctgcaaaatcatcagcatgtgctgctgcaatgtgcaaatcttctgccaagctattccggaacaattcgatttcgtaattgtcttcaccatgagcatcgtcatgtgcgcttccaattaacaaagttccttcttcagctggaattgagttgtgcatgttattttcaacttcacggatatattcaccgcgatcgttttccttgatatttaatttagtaattctaaaaattggtgtttcatccatttttcttgcctcgtactataatctttccacacctatcattataaactaatgcagaaaaataaaagcccctattcaccagttatttgatcaattttaaccgctttagctggccattcagtccgtacatattccaatgtactgccttcattgctagttaactgcacaaaagaacaattgggcagacctaaaaattcacgatggttagttttttcattaatgtattgcgacaaactatcgccatgaccaacaactaaaatattatcgccatcttgtgcatcccgcatgatcaagttaatcccgcgctccattcgctcaactacctcatgattatcttccacgcgaaatttgcccaaacgatgcagcggccaaagtagcacattgcgtgcctcaaaagcgccatagcttttctcttttaattcctttaatcgaacatactccatctcaggcccagcaataatctctaaagtatcacttgccctttcttggggtgagcaatatgctctagcaaaattaattccctgatcttgaaaataatcccgcacggcttccgcctgcttaatgcctaatggtgttagcgctgaatcacagcttccctgcatgcggtgtcctttattaaaccaagtttgaccatgtctgactaaatataaattaattgccatttcgtcttactttaaaccctctgctggccacacgtatgaatcaaaatggatctttttaccatcaactgttagcttcacgattgaagcattgccaaaaccgccaaagttcttattctcggtagcatcgcgcacaaacttagctaaaatatcaccatgtcctacaactaaagcagtttgaccatcctctaagccgcttaaaatctcgactaccgcacggtgcattctagcaacaacgtcttcgtctttttccatagttgggtctacgttaggattattataattccaaggcaataagaactcatcacgaccttcaaaaatgccataacatttttctcgcaggtcttttaaacgcgtataaggcatttgatgatcagtaataatttccaaagtatcgcaagcacgctcttgggttgatgaaaaagctttgtcaaaatgaataccctgctttttaaaataatcacgggccatttcaacctggcggatgcctctttcattcaatggtgaatcacaacgtccctgaactttatggtaatagttaaaataagtttgtccatggcggactaaatataaagtttttgtcatattttcctcgctaaatcgttttttcctttatcttatcaaaaaagcacgcgtcgtgcgtgctttcatattttttcgttaaattttgaagttcttgttgtattcactcgaatttacaacaaaacttggcacactaatgaagtgcattgagtaaatattgccagtcttggaaatgctaaagccataataattgtagtccccatcatgacgtgagccctgtgtattaaataaatcaccggcatgttcccattcgcggtaaaggctcttatcattacgctgattttccccagctcctgcaaagccaaagatcatttgcttcaagccaaagtaaatatttcgcttcatttcagccatagacataatcttcttattagtagaaaaaccagccatatcttcgacataattatcgtttaattctaagccatgtttcttgcaagcccgtacaattccggcaacatagtgatcgccatctttgatactcttgccattttgctcgtattcttgcgcaattgaattagctaaggactctactccagaactataaacccacggcttcaaacctaattgactacgagcactattaattaggcacaaagagaattctgccagttctttttgctcactagcagaaagatcggcaagattgatcattttttgatcggctttgctttcacctgagctaacacgtgaaaagtcgttttgctccattcctttcatgcaagcctgaataaaactagcacttggcttccccttatatgcttgcaataaactagctttcgtatagccactcggcatcttcattgtagctgttacataattctgcgttgcagcagtctttttaacgagtttggcatttttagctaataaccattgagagttatttccaatcttataagccaaatattttttcttgcccagctttaaatactttttagcagaataagaatactctcttttagctacagcataatacttagacttcttgcccttatttgtataaagtctaactttcttagttcctttaacctgaacttttcccttaactgctgcttgaaccgtttgtggtgtcgtttcgtgtattacactagccgtccccatcaggcaaacactagtcaacaaagtcacaattaatttttgcttcatagctgttccactttctgtatgttttgattattaatatttgttatttaaattatatcgtatttatttaattaaaaaaatcaaaaagagacacactatcattttgacagcatgcctcctttaagttagtttgattttatttagttttgaaaagaggtttatttttagtaccagccgtttgcttgccagaatgccttagcagcagtccatgagccataacgacctttgacatagttatcagctactcgctcttggttagctgctgaatagtcaccattcaagtatgaagctgaaagttggtatttaccaacgtattgaccatttgaagcaccgtatgagccaccagattctctaccggcaatccattccttagcactagcttctgaaccacttacagttgaagtagtagtttgagtgttggtgttatttgctgcagtagtagttgctgcagaattagtattttcagtttgagtttggtgttgtactggagcttgggttacagcagcttgagtgtggtagccgcgagttacatacttagcacgaacccattggttcttgcctaagtcataccacttgtgacctttggcatcgtaagcagtcttaattactttccatgaggtgttgcttgccaaagtttggccagtagcctctggattcttgtagctgttgtaaacagtgattgcgttgtctgaaacgttcttaactgttacaacagctgtatcgttttctacaatagcagcttgagcagtattagtgttgttattagctgctactaaacctgtaactgataaagcagttactgcaattgacttaactaagatagatttaattttcaaaaaaattctctccttaaaattttaaaagtcataagtaacgaattttcaccttattcgtccgtcccattcaattgacacagcatatactaccttgcttaaattgcagaactataacaggaatatcacctgcagattaagaaactattgcaaagtatgtcaaaattgtaacaattgtaatatttatgtaaatttattcagatgatacaaaaccgcatcagatcgccatttaactcgatttttaatttttatttgctatgtgcaaaagcttgttcgcatttaatatattgaaacacttttgcaaaacgaaaaaagaaagagtttcctctttcttttttaattctcacaaattttttattaatttattccattattctgccttatcctcttctataagttgacgtttattaagtgccgcaataaatggcaggtaaatcaaaatgtctaagataatattgattacttgcaaaattgagcccgcaatactgcctgttgccaaaaaaactgaaataattggcggcattgtccaaggaattacagtcccattacataatagaactaagcctaggttcattgcacaataagtggtaatcgcatttaacattggcgcaatcataaatggaataattaacaacaagttcattacaactggcagaccaaacatagttggttcattaatattgaacaagccaggtacgatggtcagtggtgctaaaactttattttgtttacttgcgcgcttgcgccatactaaatatccaatgcaaagcactaacccaatagtggcacctccatcacccatgtaaacaaagttatcgataaatggttgcgtaacgatatgaccaccatgagctaaatctaagttacctgcttgattcaatacacggttagcatcggtttgcatcaaccagattggttgcatagcagtattaactacgttaccaacatgaataccaacgaactagaacaagctcaataaaataattgaaactaatgtaccaattaaggtatcgcctaatgcacctagtggcttagccaaaatattcatgattacatcgtgaatattgccccatccaatccaagcaaaaagccagtaaacacagccagcaatagcaattacagcggcacctggaattaaagctgaaaagctcttagctacagcaggtggcacagtagctggcattttaatttggatattatgattaataaaccattggaaaatccatgcacttaggagaccaaagataatagctacaaataatcctctactacctaagtaagtgtaagggaagccttcaactggaactttatctccactcataatacttggcgtcaaaatgaagaatacagctgcagaaacaattccggcagaaacaccatctgtcttatattgattagcataactccaagcaattccaaaagctgcaattaagaccatgatcccaaaggagccattagtaatcttggctaaaatctgtgccaggcttataccatgaacagcagtttttgatagccaatcagaccaaccggcaactggaaatgaattaatgatcatgaataatgatcctacaataattaacggtatagccatggcgataccgtcacgaacagcaattaaaggtttaaaactgcctattttagcggctacaggcataatgtgtttgttaacaaacgcattcaaacctccgctcgatttactattagccataataattccctcttcaatctaaaaatgatctcgtgtttttttggtatatacctttcgcaatataacaatatcctgaaagcgattttattaccactattttaaaagataattttttcctgaattgtcaaattaagtgcaacagttaggctatgaggaaatatattgcttgaagagttcttctgctgtgtgatattgaaggattcgacgatgtttgcggttaatggcatcagttgcctgttgaacataagcagctgacttatctttcatgcttttgcctttagggaagaattgacgcagaagtccattgcagttctcattggtgcctctttcccatggagaatatgggtgggcgaagtagatctggcagcctttgatcttggtcatatccgcaaactcagagccattgtcaaacgtgatcgatttaaaccaggcaggatgtctgtcaatctcattttgaagcagcctttggcatgtgcttgcccgatagtcaggaatcttgataactacttcaaagcgtgtggttctttcggtcaaagtcattaaagcaggctgattcttgcgtctgacgcctttaaccagatctccttcccagtgcagcggcgtttttctgtcttcaatctctttaggacgctgttcaatggaattgccaagatgcttcttgtgcaaagcatgaccgctatggccgtgatgacgcttgttcctgcgtcttttgagcttcataggcagatcaatattgcttatgtccagcaagccctgatcaatatagcgatagacagttggtgtgctgggacaagggtagcctggcatagtccttttgaattcaccaacgaattcatcgatgctggtggcatcaaatttagctttaaagcgtctggagagcattctcaaaaagacagcataatgcttcaatggattgcgctgatagcagtttttgcgacgcttctcataataaatctgtgcagtatcagcgtaatagtgctcatacaataaatagctgctgtctctttgcaggacacttccgcgtttgatttcgcgactgattgtcgacttatggcagccgacttcttgagcgataacagtacgggaagttatgccggaatccagcattgcttgaatttgtccacgttgtacgctggttaattgatgatagtgcttagaaatgctagaatttgaattggtcataaagatcttcctttcttgatttttcgtcacttcaagtttaggtcttcatggcctttttgtttaacacttagtgttgcacttcaattttaaatccgggaagataattttttgcttatatttttaaccaaagtttgattaacaaaatattgcagttatggctgtaagtgctatagtttacatgtaatcataaaaaaagcgaggaaataaaattatggctaaatacgaagtaaagttaagcgaagaagatttacaaatgatcaaagattgtcattcaaagaacccttcaatcatgaaggctatgaacgaagccaagaaagtcgaagattaagcaaattttgatctctaaatcgaaaaaaggcgtccgcaagggatgccttttttattggttttcaaatcttgtaccgtggggatgcttccagttataaacacggactattttacccatgccatctagcactacaacatttccatcattatgtggataaatcaatggatcagaatgtgaaccaccgtcagtaaaaattcttgctggctcacctgggtattgcactgttctaactatacaatcatcaattgatagccgcctcatttgtcgaccatcatcatattttccttctaaagcagctgttggcgtatgaccagtcacaattgttttgcccgttttgttatgagccatcattttcaataaggaatcggaataccaatacttatctcgtgcccaaatacggtaaaaatcatagtcaaatttcaagccatactctatctcagagtaagtttccggatcattatactgttcatctggccgcacacccgcatgaacaaaaatcaagtgtggcgtttcatacataataggacagccttttagaaagcgataatactcactatcacgcaactcatcaggcaaaactgtactgccaaacagactaactaggctcttgccaccaccgttataaacccaaatgccatcttgatgttcctgcttctccgcaaaattgagtaacatttgctcatgattacccagtagtacgattgctccttcgcttttttgctcaattaaataatccaatacttccttcacatgctcgcggccatcaacatagtcaccgcccgcaactaattgtgcttctggaaaatctgctgttgcctgcttgattaagtctaaggtttctaagttgccatgaatatcagaaatgaagatatagttctccttcactcgatcatccaacagcgttcgattgataatttttttcatttcatactaccccatgtgctaaattaaactaacatttttttcttaattatagcagatgtacactggttctttttctatgcaatcctaaaattaacctccggcaaaaaaaaggctacaatagatatgaaaagaagtgattgcaatgtttaatgaagaaaatgcaattgatgccaaggacttacacgttgattctttcaaatatcaatcaactgaagacatgccatctgatgcttattctagctgggaagaaaaacacccaaacgccagggtattcaagcttgaatttcgcaacatcggcgaaagcaatgaatggcaggaaatgatcattatctacactgaataaataaaaagtggaagaactccaagcctagtgtgtttcttccacctttttacttattttgattttctttttccttcaatttgtgcagaatccgttcattttctttagtacgtttttcaactgctgcatcgatgatcgaatcaaaccaatgattatcagaatcatcgcttgtttgatccttcttttgaggaccttcattttttacacgtttgtcagtttcttcattaataatggaatccagccaatcaaaattatctggatcatggctcttatcagtcatttatttttcctccatttttgatttaaattaatttatttactattctttttgactataattgagttaacaagatgaaacaagaaagaagtgttcgaaatgaaaattacattcactgacaaggcgcttgactacttaaaaagacgcgaaatcttgaataaaattctaattttaatcgccgacgatggtggtggtaaatattctatcaaaggcggcggttgtgcaattggcagtcacttttccattatttatgtagacaaagttgatcctgattatccaatcaagcttgaaaacgaccaaggaatcaatatttacacttctaaatacgacaccacaatgatgggaccaaatttagtggttgactacgccaatgcatccctcaacttaaagagtgacgaaggattgcttgatggcggcgttgatatcggcaatggcgccgagttaattaaagctcaaaagaatgtaaaaatgaccggcgttgaatggcgttgctagattaagatgatcagaaaagacagtagtttgaaatcaactactgtcttttttctatagaaattgaccactattaggatcgaatccagtacgatctgccgcggtaatctttctaattaccttgcatggattccccgctgcaattacattatctgggatgtcattcacaactacactgcctgcaccaataattgaattacgtccaataattgtatctggagttacgctaacccctgcacctagccagacattgtcaccaatgccgatcgaatgtgcaacacaaccaccggcttttcgctcggctggatcaaataaatggttgctggtatacaagccaaccttaggaccaaacaaaacattgtttccaatataaacaggcgcgccatctaaaatcgtgcaatcatagttggcataaaagttatccccaacatgaatattttgtccaaattcacaacgaaaattagggttcacgaagggatgctcacctgttgaaccaaagagttctttgattaatatttcttttttagcgtgatcattctcattattaatattattggtcttcaaggtagcaaggtctctcaaggtgccaaggcgaggatccgcatcattataaggacgaccagtagccatgtaattaaattttgttctaagcgacatgattctttcctttcattagttcttctatttttattatagaaaagaaaaagcgctttcgcatgtttgacgcataatatttagcacactagccctaatcttattgcttattctataatggtaaaaaagaaaggattaaagccatgaaaaacttcaacaaatttaccgctaaatctgcttgccttttacagaatctactagtagtctcaattggtttactcgggattattctgatcatactcttattccgcgatctaattccactttgccaatcattattttcaactaagatcgaagaaagcaactccgagattatgtcagaaattatcgttttcttactcttctttgaatttactgcaatgattatttcagccttgcgtcatcacggtcacactagcatcaattttctattgggcttaggtgttactgcgctaattcgcagtctgattacttctcatagtaacatttggagtacgcttgccacttctgcttcaattttagtactagtaatcgcaatggttattttcaataaaaatctgcgtaatatgtaaaaaaactgtatcactctaggctaatgtcattggagtgatacagttttttgttttactaattaactttgcgccatgaactcattaagttgtttcttagaaaaaacattgccatatttgcatactacgtttcctttcattattgaacgtaattcacacaaccaaaaaagcatcatttattaacaatattgaaaataaataatgctttttagtaatactctgatgctgaatgccagagtcgaactggcgaccttctctttacgagggagatgctctaccaactgagctaattcagcaaactcacaacacatgaattataccaaatgtcgctaattggcgcaacgacctttttctaagctagcattcaaaaaagaacattatttccaatctaagcacaatccttgcttgtgcaattcttctggcaattgatcacgatcagtttcatgcagatcaagttttttacctgtaatctgcttagtgaatgaatcaatgcgacggttagaatcacgtaagtcataatatgtcgtaactatatcatcatagtctttaaggtctttcacatcaaagtctttcttataactaccttcaaaacaagtgaacttaagtggtaatcgtggttttaattgtggcttttgatctggcataccgacttgcatccccaacactggaaaagtcaactcaggcaaatcaagcgtcttaagcaaatccaacggatgatcgttaaccgtaccaagtggcacatagcctaagcccatactttctaccgcattagcgacattttgaaaagcaagcagcgtatcttctattgcttggaaaaagatatcagttgtgtgaacacggccgtcgtctttgtcaagttgctttctaatttgttggttacggtacaagtcaacgataaaaataaacaaatcgccttctgcaccaacatatttttggttacataacttttgaattttcttcttttcttcaggatcggtaacgtgcagtaagctagcattttgcataaacatgctggttggagtttgaccaaagacagaatacaaagtttccagttgttctttagtcaaagtttgatccttaaattttctaatagaacggtgatttaattgcgtgtcgattgtttcgttatgtatcattttcatccttcttactaataatcagtaagttcattataacaaataatatggctacttttcttcaaattcaattccgtaatctgcttgctctccgtgctcagctaaatcaagccccattaattcatcttcttttgatactctaattggaataatccttttaagtaataaaacgattatcgtcgtcatgatccctacaaatatgatagtaaataaagttcctaaaatctgagctgtaatcaaatgcaacccgccaccataaagcaagccattttcaatttgcgggttaacaatcttagtcgcaaataatcctgtcaaaatcgaacctacaattcctgaaacgccgtgacagccaaatacatcaagtggatcatctagcttcaattttggcttaatcacatgaatgaagccgtaactggctagtgtacaaataaaaccaatggcaaaggctcctgccacagtaacatagccagctgctggcgtaataccgactaatccacacaaggcacccgtacagaggccaatcatagtagtcttttctttaataaacatatccaaaaacatccaaaccacaaatgacgtaccagttgcaacagttgtagttaaaaacgcttgtgtagctacatcgcttacagttaaggcagaaccaacgttgaagccataccaaccgatccataatatactggttcccattaaaacccatggtaagttataatgcttaacctcaccatttggatcaaaatcaattcttggaccaacaaaaattgataaaaacaaggcggtaataccggcggtaatatgaactacagtcccacctgcaaaatcaagcatccccgttttggctagaattccatctggtgtccaaaccatatgaaccattgggtaataaatcaagatcgaccaaattgcgacaaatgcaagtaaaaatttaaatttcattcttccaaccaccgcaccaacaaacaacgccggcgtaataatcgagaacatcatctgaaacattaaataggtcaaaattgtgatgcctgaatccttggaataaagcgtctttaaatcaaagccgtttaaaaagacacttttactcaaaccaaatattccaccaacatccttacccaaagccaagttataaccaaaagcaataaacaaaacgattgcgacacctgtaatcatgaatactgaaatcatcgtattcacagcattcttctttgaaaccatgccaccatagaaaaaagcaagtccaggtgtcataaagaaaactaaaacactagcgacaaaaacaaatagagtgttcgtttgattaatcatctttttttctcctcaaagtaaaatagttagtcctaatattttaaattggtatatacactatttcattgatgttgcagcatatatgcttaattaaaaaaacattggtttgataaaatttaattctcattatacactcatttttcttcttgtcattaattttctataaaaaataaaggtgcatagacgtatggcttctatgcacctttgcatatatttgcttttaattatttgttttcgttttcaagattgttgattgcagtttcaaccaatgcatatgcttgttgagcttggttcttagcttgaacatattcgttcaagttgtcatcaccattagtaagcacacgtgcaaatgaaatttgttcagccatcaagaagttgaacaatgaatcccacttcttgtcttcaaacttgatttccttagcagaaattctaggcatcatttcacgtgtggtattaaatgccttttccaaaatttgttcatctgcatcggttaattcacgcacattgtatgcttggtggatttggtgaacctttaaaagttcttttaataaagttcttgcttgtgcatcttttgaaactgattggttaatttttaaagccatttttacctactcttttcttttttattaacaattataccaaattgtcttcgaccatttgcttaacgcagcgtttcatttctttaatatcaagaatactgtaggcaaattcttttctaagtagttcctttggcaaatattgatcgtacttgtcgattcctggcacttcgtttggataaaccagatcaagcggatcaaagtctttatcagcttcttcgcctaaaatgcgccagaagtcatgctcatcagcatccatggcaaaatacatgaagtatggtctagatgaattaaagccacggatatttaactttttaccgcacttaattcgaattaatcgctctagtgccaaaaatgcataagtcccagtccatggaaaaagacaccacatattaccgcccagcttgatcaaattattctttggcagaccagctaaagcggcggtgtctctagcttgcgtcaagcgagctttaccattttgcatcaaatatggatacatcatcttttctgcaagtacctttttcattctctgtaaaattttaggttgaatatctccaggtacatctccaaagtaggcaggaattctaccctttacttcatggcaatatacttgatgacgcttgatatccacgtcttcgacaacccatacacgtccagcaatcgcaatcttgtctcctacaggaggtggcttaacgatcgtacctaattcttcgctgccagcgtgaacactgaattcctcgttttcttggaaaactgcgtaaaatttaaagttattcacaactcgttcaccagcaagaccaacgatcagaccaccatcttcagtccactcaatgtgacctgttttaagcaagtgtttgagcaaaacgcgataatcgtcttggctcacgttgtggaaatatgacaaagttaacacccgtgaagcaagttcagctggcgtcatttcaccgcttgaagccagcgtactcatcgtctgatgatagagcaaactatatggcaaacggttaggttcaggtggctccacccatttttcttccgcatacagttgtaccaaggcaatcccttgaagtagcggccacggaatcagttctggcaacatcgctcttgattcagggtgttcttcgcgcatgacaaagtgcatctctggtggattaccgcggcgccctgtccggcccattctttgtaaaaagccagacacagtaaatggcgcgtcaatctgaaaagcagattctagtttgccaatatcaattccaagttccagcgtagctgttgcacaagtcgtcatgtagacatcgtcatctttcattgcggcttctgcagtttcacgcaaggctggagacaaattaccatggtgaataatgaagcggtctggctcatgattataggcacaatatgctctgagctcctgacaaacagcttcacattcttcacgactattggtaaaaacaagacactttttaccacgagtatgctcaaaaatatagccaattcctgggtcagctaattctggtgccttatcagttttcggttcgatttggctcggatcaaagtccctggaacttgcttgtggatttgttttataaaaatgttccatagataaatgccaaatctgtggttcattttgtacccttggtgtaacagtttttctgtttgaaccagcacccaaaaacttgctggcatcttctaaattaccaatagtagccgaaaggcctattctccgtggatttacattagctagttttgataaacgctcaattaaacaaaatgtttgtccaccacgatcacttctaagaaatgaatgaagttcatcaaccacaatatattttagaccaccaaaaagatgcggaatatccatgtgcttattgatcataaagctttcaagcgattccggcgtaatctgcaaaatacctgaaggatgcttgagtaacttgcgcttttgtgtttgagctacatccccatgccagcgccaaactggaatatccacatctgtgcataagtctatcagacgatcgtattggtcgttgatcaaagccttaagtggcgcaatatacagaacttttactgaatcttctggctcattataaatttccgacaagatcgggaaaaaggctgcttcagttttgcctgacgcagtcgaagccgacaatagcacattatgatcggtgttaaaaatttcttcggccgccgcaacctgaattggtcttaaacttttccagccatgttcatagatataatcttgaataaatggcgcataatgtgaaaaaacgtccatagtccatttccttaaatcttaaattcggtataatccttttccacattatccgaaacagcctctgacttggtatagctgaattgatccgagttaagcagatcagtgatctttctatcaggattctgccaaacaatgtcgagcagctcaataaagtcacgaataatttcacgtggcgtgatattggtatccgctccaacacgggcatattcaatcttaataaattgagccaaatcatcatcagtaatcgtgcgctcataaccgtacaaattggcatgcatgtcagctagtttttcagtcaaaaccaacatttcttcagcggttaatggttcaagcttaattactggcgcatacatatcacgtgctccttcttgagcgaatttgcctgaagcaagtcggctgcgtaaagcttcgtatgaataaactccgcgacgacggtctttaactgcttgtggcgtaccacacataataatgcctaagtaccttgctttgccctgcaaggtatcgttgtacatggtcaaaatcttttcatagttgtactggcggctaattgtattcggaattttataaatattaaccaattcatcaatcataatcattaaaccagcatagcccgcttgtctaaagaaagtcgcaaataactttaaatattcataccagtcactatcaccaataatgatatcaacgcctaattcctttttagcctcagtcttatggctatattctcctctgaaccacttgactactttagccttagtctcatcatcaccactcatataagcgtgatagtacatgttcagcaatttagcaaaatcaaaaccatgaactaattcgtttaatgaagaaatgacgccatagattttttggtcaactgcttgctcaaatttaggatcatcattatttaagcctgtttcttgcgaaacttgcatctgcactgaattaatccagcgatctagaatcaaagtcaaggcaccaccttcaggcctagtcttagttgataagttctgaattaattcacggtatgttgctaaaccctgtccttttgatccttgcagccgacgttcaggtgataaatcaccatctacaacaacaaaatttttatccatcacatagttacggatcgtttgaagtaaaaaactttttcctgagccataacgacccacgataaaacgaaagcttgctccgccttcttgaataacatccacatcgtgtaatagggcctcaatctcggcctttctccccacggtaatataaggtaaccctattcttggcactaccccaccctttaatgaattaaggacagtttgcgcaattctttttggtactcttcttttttgtggcatgatttcatcccttcaaaaacatatcttttaagtcatctacataatcggtaattacttgtggttggtcctgttcgttattttctaaaaccacatcaccgaattcatcaaataatttttcattaatattatccatcaaaattgatgccattaaatggtgctgcttcaaataggtctgccaaggctgctgcatcagcaatgcagttaagaaaaacatttcattttcatctaagccataatcattatcaactttgacagtttcatctgcttgtttttctacttcttcttgtgcttctgcctgctctagctgcttttcctcatccgttaacaaactatcacgcgtcttcgaagcattggcccgaatttgatccaaatcggaaaaatcaatcttaatctgatcaatctgcgcctttttttcttgaatgcgatattcagcaatccccgcgttaattgccttaagtacagcttgatcaataaatcgcggcttaatcgaccgacctagtttaaattctgttcgcgccactctatctaattcatggagaaaattatttaaattaacccgctgacggctgatttgttgatcacaatgaatttgccattttccttggtaaaaatgatactttcttactgcatcaatctgatggtcagctacttgttgttttcgcagataaaaaacactgcctacaaagattggcttttcaattatatcaggcttgcccacaaacgcactgtaatacgcaatgccgtattttttagcatccagcagctccagccacacgtaacgcaacagttgaacaaataacttttcattcttattaataactttagatgaattccaataagtcgttttctttgcaaagactgctgctaactcttgcgcagtaaatttttctggatggtgtaaaacctcataatcatgatcacgcttaatctcagatgcaaagcgctgcttaataatcttttcgtctaaatcataataaagaacataatctttgagccagtcttgtaaatatacatcaatactaatgtcaaattgtcgcacatatttttcttcaaattctaacagcttttcatatccatcttgtgcgtcatcaacaccaatattgttcagtaattcataaatataaacaaaggcataggatgtactcgttttttcaaaaacatgctggcgaatcttgctgcgccaagtaaagtaacttctaagctgcccagtattcatatcatgataagttggataaaaacgcttaaaggcaaaaaattcaggataatcatcatcatagtcggccatcatcctagcctgttgataaaaattcttagctcggccacgactgggcaaaatactgtagtcataaacttctagcatctttctaattctatctggaaccagactattgttatgcttcttgcgaagattttcacttggtttaattgcttgggcttgatagcggtcatctactttatctggtgcaatataaaaatattgattctgggcgatatttacttcatcaccattcatcgccagtttaaaagcaaaatcaagtgcttttttgagtgaatcttcactaactttttctaatattgtcccaacccaatctgccgccttgatcttcattggatcagtgaagccaggcaaatctcttattagtgcagccattgcaccacatttcaggtccaatatactctgaccttgcccacgtgataatatcgcaaaataaccactatcaactggtgacattaaaacgtaaacgctagtggaacctggtacagcaggcttaaatttcaaaccatatttggcatagacatatttgaagagttgatttgaatccattttgtctccttttttcgcacgtacgttcattatatcatcgatttattttttaccaaagtcacgcatgtcagctcctcatgtatatttttaagtttcataaagtttatatttttatatttgtgtggttattaacaaacaattatgttactatagtttatgtaagttattgaaagcgtttttataaaagcttcctagagaggacaaaaacttaatatgagtacaaaagaatgttattctcaagatgaattaagaaaagataatccaatgtttagccgcactcgtgccactattgaaagtgcattttacggcaacaatgtccacgaagtaaccagtgttgcagaagcttataacttagctaagaagcaatcaggcgttattgttactgacttgccaatcttacacactaaggaattaggtttgccacatggcgcaacccaattggtttacaaccacggcaagattttaggtagaactgctagcgcccgtcactttgttgacaatcctaatgaagatgctgaagcattggacggcaacctacgtgaagatatttacaagggtcatgaacaaaagtacttaaaggctactgttttagtaggtcttgacccatcattcactgttaaggctcacattatgatgccagaagatcaagccttcaaccttctttcatacatcctcaacttccacttcttcgacgatgaagctgaaaaattatacgaaaagtcaaagttctacgatgaaccagacatttacttctacttcgatccaaatgttcaagacgaagattaccctaagggcttaggcgtatttgacgctccacataactgtgctgctgtcttcaaccttcgctacttcggtgaacttaagaagggtactttaaccttagcttgggctattgctcaccgtcacggctacactgcatgtcacggtggtgaaaagtcattccactttgacgataaggacgacaagacctttgccttctacggcttatcaggttcaggtaaatcaactttgactcatgaaatgtacgatggcaagtatgacattactgttttgcacgatgatgctttcattatttcacgtgaagatggttcttcagtagccttagagccttcatactttgacaagactcacgactacccagcaggccaccacgagactaagtactacaccactattatgaactgtgatgtaaccttagacaaagacggcaagaaagttatcgtaaccgaagacttacgtaacaacaacggtcgtgttatcaagacccgctacactagtcctcaccgtgtagactttgaaaagtcaccaattactgcattgttctggattatgaaggacggttcattacctccaatcatcaagatcgatgacccagtattggcaactactatgggttgtactttagcaaccaagcgtacttcggctgaaaacttacctaagggctttgacatgaatactttggttattgaaccattcgcagacccattcagagcttacccagtttcaggtgactacagagacttcaaggaattgttcactaagcgtggtgctagttgctacagcttgaacaccgacgcatttatgggtaaagacattcctaaggaagttactaagaagttaattgaagacttagctaacggcaatatcaaagacagtgacttcaagccattcggtaacttcaagggtgtatcatacttacctattgatggttatgaagttcaccttgaggacccagaataccaaaagaccttagctaagagaatgcaagatcgtttgaactggctcaacaagtacgatgaagaacacccagaaactccaattcaagatgaagctaagaagaccttggaagctatcatcaaggaattgatctaatattaaggaaataaattagtgtctcattcaattaaaatttaatttcttaatgacgaaaagacgagagttgaaattcagctcccgtcttttttattgctcaatgtaattttgcttctgtagtttggcatctatcagtttataaacttgcactttattctcttgtgcaagttgtggattatagttatgtgctatttcaatgacaatagccggcaattggtagattatcttatgaatggcatcactatttttagggtctaaacttgaacaaatctcatcaagcaaatatatcttcttagaacgaattagacctctaactaaagcaagtcgttgtgcctgaccacctgataaattgttcgcgtcatctgaaattaatttatctaaaaaatcattgccaaactcatgaatcagtcccatcttttttgcttcatgaagcattagatcatcaggtatgttttgcagaagtgatagattctccctcactgtaccttggaataaccagattctttgcgagatcttgatgaaatcggcaggattaatttgatgaccagcaaaggtgatttcaccgttatacttcagattattagcaatacaattaattaatgtacttttcccaatgcctgaagccccagtaacaatgatcttgtcatgatcacgcaaagttaaatttataccatctaaaattttcttatcaccatatgaaaaagacaaatcttttattttcaaaatagcttgagagtcatgattatcttgtttaacactttcactttcttcaaaattatagctttttatttttctaattgcatcggtgctatgaatttgagtctgatacaaagcaattgttcttagatatcccacaaccctatcagctgacaaacttaaagttataatggccgctaccgttacgttaaaccagcctctctgcataaaaagcaagccaataaaaattggtagcaatagtgtaactaaagagattaaccatgcaatgaattgtacctggaattgacaattattcatcttacgatatttgtcttcctcattaaccaagattcgatcaaatcgtttaaagaaaagatgtctgacaccaaaattcagtatttctaagcgtccttcaaatatatccttcattgcctgaatcaactgtgagttagatttattccatttttcggttttctcattcatcctcttcttgccaatatagcttggaatcagggttagcgctgaaagaagcaaataaataattcccaaaatcagattagtttctacaacaactattgccgatgcaaccacattaaatacaaactgaactatgtcagttatcccaaagaaatatttttgttcaatttctttagcagtaccactaatcgaattgattacatctgctcctcttgcttgcttcatgtctgaattagcaaatttagaataaaaatattcttgctttaaagcaatatttaatagcatcacaattctattttgaaccaaataaaacaagagcatggctatgtagactatcagatatgcgccaaaggctaagccaataaatttataaacgtggtcaatgttactaaaattgatattagttaattgtccaaacagtacagcatttaataccccttcaaatgctgaaatggccgataaaaccagaaaaactatttgtaaatatattggaacatgttttactacccatttaaaatttatttgttgtgtgttcattgtttaatacccacatatttctcataatcaacaagccaatcttcatcatttttataagaatgattcatacactttttaaacccaattgctttaaatcatcttcatctttagtttctaacaattgtcgctcttctagagacaagtgatacttattcactaaggcatcaatattctccaaagaaatatttttaccatcagaaagatcctttcttcataccttcagacattactatacctcctattttctctcgttaagtaatgcataattttcaacttgcaatttactgtgtatgggattgatatcaatgcttcccataattccccaaatgcttataataataacagtaagtattctcttattttttaatttcaaagccaggaattcattatgtacggtcaaaaatttaaagcacttcgtcttcaacaacatatttcactagagcaagctgctaacagagttatctctccatcgactttatccagatgggagaataataagattgatattcgcttcaatttagttattaagcttttagacaatattcatataaacctaaaagagtttactaattactgcaaaattaatcatagtaatccatttgttgcgaaagtggctatgtactatgaagccaacgatgatcgtcatattttgcaattaatacaaagcaagaaaaaagaataccaaaattcacataatcaatttgatttacttctactagctatcgcatgtaattgttattacgatctaactgataacaatgttttcccagtgagctatcaaaagaaattattctacattttatctaacattgaatattggacagagatgtacatcaatgtttttggtaacactgtttttctctatgacagcaaggaactatatagtatttcaatcagaattcttaaaaatttaaattctaatacatttaatgattttcaagaatattattatgctttatcctctgtcatcaacgccctaaccgctctaattatcaaaaatcccaaattagcatcacagcttttaactaaaatagagaaagtttcaattcctaaaccaatctcttacttaaaaattagaactaatgtcctcaagtatcttttagattaccgtttaggcaaaacagatgaaaagcttatctcaattaagctagaaaatttaaagtggttaggattaacagatattgcaaaagacttaactttcttctttaaccgtataaaaaatgatcgttcacctctttcctaattcatttgcctattatattaccctcatttttatctaattgatttttctttgcaaatatgcaaaattatttttagcaagaataaaaaagcctattaaatctaggtgtttacaaaccctgatttaataggtcttttatgcgtcttttttattgctcaatgtaattttgcgccttagttaaaatatccatcttctcatgttcagttaaatacttttgtgcttctgccaaattgacccatttactagctaaaatttcttctttttgaatgttaacctcttgtcctgcaacatagctagcaacaaaataaactactgtcttagctttatcaacagtcaactgatattctgttttttctctaaaagtaaagtcaaaattcggctttaaaccaacttcttcaaaaacttctcttctagcagcttcctcagctgtctcattattttctaaatggccttttggaaagccccaattatgatttacgacgctctgcacgatcaaatatttcagctcgccgcttctacgttctctgtaaataactgcacctgcagaatgttccatcttcatttttgtcacccaacctttatattgcataattattaaatatttattaacgtatgtcaagcaattgtaatcaaaaaaatgaccagatctttgacgatctagtcactttattcgcagacgaaattattaagttctattggtagaatattttaagttacttcttcaagttcttttcgcagtattccttgaccttgtcatcatcggccttaagaatccattcaactgcagcctcagtcttcatggtgtctcgaccatttacttccatttcgtggtcccaaatagcgtcacgaataggcatttcattacccttagcccagtcaaaaacttgatccatatttctatcaattaatgcagtttcttcaatttcttttgcatctgccataattaaaagcttcctttctgataacgactttattgtagttctattagctacaactgttaacaaaaagggacttttttatttaaattctaatttttgccattaactgcttcatcagccttattcactacactaaccgcattaagtgaacgaggataaccaatgaatggtacgttttgttcaatgaccttcatcaagaattccttgtcattgcctaatttgatatttgcttgagcatgggccatcaattgaggttcacagccaccttgagctgcaatataacagaaggtaatcatttcacggtcattgtcatccaagccttttctagtgtagtaagcgccaaagcaattatcaactaaccacttattgattgttcccttcttggcaaaacccttcatttgtggaccaaacaagcgcatttgagtttcctcacccttttcaaggcgattgtctagtgtagtagttgcttgacccgcaagaggtaattcaacgccgcgcttagttaaaacatcattagtaatcttgaaaaatggggaaactctacccaaacctaaataatcaaccgcttgatataaacttccttagcttcaactgggttaacaccattgtctagtacgactggaagcattatttcatattcttccttgccttgcatccccaacaaataagctaaagttgacaacatcttagtccggtcgggcaaatcaacgtctttttgcacttcgtcaaaagcaaaatgattaattctttccaaagcttctggatcagtagccttcaataagttggcatgtactctttatgcatcttctttaattgacataataaattcctttctaaacgcttatctctactatttatttaagtacgattgagtctaaaagaaaaatatctattttttattctgcaatataacttattcttatcaaaaaaatatcctaaaggctttttgccttcaggatatttctattaggttatttaattagtttttcttgtctgcttcagcatcatggtatgacttaacgatttcatcaactaattctggatcatctttcaaatcagtagtttctacaatgacatccttcaagtcttcatctttaagcatttgcatcaacttaacgctttccttgtcgttaggttcatcaaagtgataaattctaccaacagtttccatcaatgcactgtagtccaaacctctgtccttcaattcacggattggacggataaatctttcattgtagcctaacttacggattggagttctaccaacacgagcaatatcatctgaaatatatgggttttggaatctgctcaaaatcttgttgtggtattcttccaaactttcttcggtgaattccttgttccacttgtggtaaagaagtgaacgggtttcactcaagacacgcttaacttgctttaaaacaaatggatccttaatagcatccccaatagtgtcatagccaaggctcttgccagtataagcaacagttgcgtgtcccgtgttaactgagaataactttctttcgatgtaaggttcaaggtctggtgcatagtcaacgccctttaacttgatatccttgttcttcatttggctttcgtcaataacccattccttgaagtcctcaactgagacaaacaatggatcgtcattatgttggataggaacaattctgtctacagctgcgttagggaagccaatgtacttgtctagttcaggcttaacgtcatcgtccaagtgcttataaacttcttcttttaagtgttctgaaccgccaatcatgttttcacaagcaatcacatcaagtggagtagtgttgcctgattgaattctagcagttaatcctttggcaattaatggagcaatgattgccaaaatctttggaccaatggcggtagttatcatatcggttgatttaattgcttcaactaccttgtctggatccttagcattgttaattccatcaacatttgaaacatgaattctcttcttaccaggtgcggctaattcaatgtcatattcaccacgcttgtttaattcatcaataatagtttcattaacatcaacgaagtcaatgccaaaaccattatctgctaaagtttcaccaataaatccacgaccaatattacctgcgccaaaatgtactgctctcatgtttaatctcctacgttctttaataaatcaataatttcttctggtgtttgtgcgtctgcaagctttgcaacgttggaaacatcactacagaaaatagcaatctgtgacaaaatatttaagtgttcattgttcaaaccagcaatcccaaagacaacggttaccaattgctcggtatcatccttagggtcactaaaatcaacgcccattggaatttggactaccgaaattccagtttttttaatgtgcttcttaccttcgtcagttccgtgagggatggcgatgaaattacccatataagtcgacacatcttcattacgggcaagcattgaatcaatatactctggttcgacacagccgccatcaactaataattgaccggccattctaattgcttgatcccgcgttggtacgtcttgattaagtttgatcatttttggatctaattgtaatgccatttagctcatccctttctaattcaacttttgaatagcttcgccaagctttttatctttaagtaaatcatcaacaactagggtttgaatatcactgtatctgacagccaagttcttattagcagctggagtaacaattactaagtgacttggatcatcagtcaattcgttgattcttactgccttaacaggagtagtcttaccagccttcttaattgcgtcattgaataaactagttgccatagtagcggtacctaagtgttgatcgtgacggatgaagtccacttctttaactttactgaagtcgattccttcaagtgaaccaaccttcttaactggtttttcagcctttggcttatcttctacttgagttaaagctttgaagctagctacgattgtgtcatatttcggactactcaagaagttgccaaccgccacgtgcattgcatgtggagtcttttgtaaagcgcggtcagctaattcttcttgcgtgatgatcaacaaaccatcttcatctttcaagtttctaacagcggtattggttactgaaaccttaatgccagccttcttgaatttatcacgcaaaagtgaagcacccatagcagatgaacccatacctgcgtcacaagcaaagataattttcttaacattggcatatgacttaactgattcatgtgcatcttcagcttccggcattgattgacctttagattgggccttcatggcttgcatttgggcttgttttgcttctaactcatcaccagtactcttgtcgtttttaagaataattgcggcaataatgaatgaaacaactgcggcgccaagaacaccaacaatattaccgaaataagcatcctttgcggaaacaagcaagatagctaaaattgaaccaggtgaagcagctgcttttaatccaccaccaagagtagtgaataagaaagtaccagtaacaccaccaatagcggctaaaatcaatgatggtttcattaatacatatgggaagtaaatttcatgaaccccaccaaagaattcaatgatggcagcaccaggagctgagctctttgacttacccttgccaaataaagtaaaggcaagcaagattccaagtcctggacctgggtttgattccattaagaacaaaactgacttaccaacttgtgcagcttgttggatacctaatggaactaagatcccgttaccaatagcgttgttcaagaacaaaactttggcaggttcaataatgatgttggctaatggtagtaagtgaactctaataattgcatttactcctgcactagcccattgactgccaacttccataatcggtccaatgataaagaaggcgaaaatcgcagcgatcatgcctagaataccaagtgaaaagttattgtagatcatttcaaaaccagatttaatcttgtcctggaatacttgatctagtttcttcaataaccatgcactaagcggacccataatcatggcacctaagaacattggttgatcagtaccaacaattacacctaatgtaccgattgcaccagcaatggcaccacgttcttcataaaccatgcgaccacctgtataaccaattaacagtggcaacaggtaatgaagcattggttgaactaagttattaatttctttgttagggaaccaaccgtgtggatacataaagaatgcagcggtaagtccccaagcgataatggcaccgatattcggcatgatcataccggataaagctgtaccaaatttttgaaccttcactttaacagaagatttactttttgcttgagccattttcttcttcctctctcatcaacttacatttttattctaagtcaatcagtaagcgcttacaatgaaataaaaatagaactctggcacacttttgtgccagagtctgagtttacctattctattaagcttttgaactattggttacctagtaaccgatctttgaggtcttgtaaaaaaagtgccgcaattgcttctttaatttctttttgactgccatttgtaaataaatctaagttttgactagacatgataatcatgctggaaatagtactcattacccgctgttcgggtgcagtaagattgtctggtgccagcatcaaaagaactcttttgacttgaatggtatcatgatccattgattggagcgagatttcattatctaagtcaaacatggtaaatgaacagcgtgtaatttctggactacgtgtgtgtagcaatgcgatatggctgttagggatgccaactggtgccattcgtacacgtttgagaagatttttggcaacgggcatttgcttacgaattagtgttgaatccgaatgggctaaacattcctgaattactgcaattaagtcttgcgaattgtattccagttgttgaatcttgattccgttgactagctccgagcaaaataatgtactaatcgatagcttagcaagttgttcgactgaatggggatgtttttcttcaactacctgtttagctggaactggttgaggatatttttgttcataatcttttaagtaagcgcggatttttattaattcatcatcaagcagtaatggactaacaagtaaataatctcttgagaagcccttcaatctcaaggttgaaaaaataagattgtaatttgacaagtctatttgatttaaggcagaaacacggctggttttgacttctttgatttcagaaaattctctttttagtttggcacctaagattgccgacgttccaatgccattttcacaaattactagggccgataaattacgctgctgattgcgactcgtgtattcattggcaaaataaagcaagatcaactgcaactctgacgctgtcaaataattttctggaaacgctaaatgccaatatttttgaatagctagatataaatcaggaaacttttgactaaggcctgccagaatttcaataggtgtatctggtaaaagagctactttatgttgtactaaaccaataacgtgtttcgtcactttagtcataaaactatgatctttttgaaaatcccaatgcatttcttcagaaacgtgttgaacgaattcttttactttgactgagattgctaattcgcgctcattataagtcaagtaagtgttgtgataatcacatgataataacttattagctaagtatgagacatcattttggtcaacctcaacttgccgcttttgcgcaaacaaggccataaaacggtaaacataaccctgatatttaagtgaatcagcactggggtggataaaatctagcttgcatcccgccagagttctttttatcgttaccgcaaaagttaaaattaactcaatcagcttttggtcactgtctagcttaattttaccaaacacgctttttttaagacaatcagcaacctctactagcaaagccttatcaatcattgtcaaaaacatgtctttgcttgtcgtttcattatgcagatacttaaaaaagttatattcattgatctgattgagcataatatcaactaaaacctgacgccgtattttttcaggcgcctgaattaacagtcccacaccctttttgcggatcaagtcaatatgatatcgttttagcgacctttcaaccgtattcaaatcactttgaatcgttgcttcactgacattcaggtcaagcgcaaattgaataattttacatggctccgtacttaaaagcaacttagctgcaattatcttctctcttttagctaccgaaattacattttgactgtgagattgttgcacagattgcttaatttcttgtaattgctttgaatcgccagataaaaaatattttcctttttgattttcaattttaaagtcgttcttcttcaaatcgccaaattcgcgataaaccgtccggcggctgatctttagactctcttcaatttgtttgatacttaccccactcggatttcccaacaaaatttgaagaatgtgcttttgccgttgtgttaaaaacatcccatcatcctcgcttacgtttaagtttattatacttgaacgcaaaaaaagaagacagatctcaaatctgccttcttgaggatatttatttacatattaattattcaacagtaacactcttagcaaggttacgtggcttgtcaacatccaaacccttatcctttgaagcgtagtaggcaagaagttgagttggaactactgtcaaaagtgctgacatgtagtaattaatttctggcaacacgatcgtgtcatcactatttgcgaattccttgcctacaatagtaattactgaagcaccacgtgaagcaacttcttgaatattaccacgagtaagatctgcagtaactggatcgttaatcaaggcaataactggagtgccatcttcgatcaaggaaatggtaccgtgcttaagttcagctgcagcaaagccttcagtttgaatgtatgaaacttccttcaacttcaaagcaccttcaagtgcaacagcgtgatcaataccacgaccaatgtagaatgcgtttcttgattttacaagatattgatcagctaattccttaagcttttctttaccgtcaacaatttgttggataccttcagcagcgatggctaaatcatgttgtaagtcccaatccttagcatcttgattaccaagtttttcaccaagtgccttagctaaaatagcttgtaaggcaacttgtgcagtgtaagccttagttgaagcaacggcaatttcaggacctgcacctaaaagcattgtgtagttagcttcacgtgataaagttgagccttcaacgttagtcatagtcaaacttggaataccacgcttgttagcttccttcaataccacgcgtgagtcagcagtttcacctgattgagtcaagaaaataaagaatgggtgcttgctcatcattgggaagtggtaaccagcttctgaagcgtaaccaacttcggtaggaataccagtgtagtgttcaaaaatagttttaccaactaaacctgcatgataactagtacctgcagcaaagatataaaggcgatcagccttagaaatagcatcaataatatcttgatctacctttggttcaccattttcgtcaaggtagttttgtgacatgtgacgcattacgcctggttgttcatcgatttcttttaacatgtagaattcgtaagtaccctttgaagctgcgttagggtcgatgttcaaaacgtgaggttcacggtctacctttttgccatcaacagtttcaatagtgtaagaatccttggtaatgtcaccaacatcaccatcttgcaagtcaacaaaagtcttagtttggtcaagaacagaaatagcatctgaagcaatgatgttaaagccatcaccgattcccagcatcattggtgacttgttcttagcaataaatacgtggtctggttctgtgttgtcaacaagcaagaaagcatatgaacccttaaccaacttcaaagcttccttaaatgctgaaaaagcgtctaagttcttatcacgtgcaattttaccgatcaattgaacaactacttcagtatcagtatctgagtggaacttaaccccttgcaagtacttttcctttaattctgtgtagttttcaatcacaccattgtgaactagatagaaacgcttggtttcatcaaaatgagggtgagcgttatctacagttggcttaccgtgggttgcccaacgagtatgaccaataccaactaaaccttgttcatctggagtcaacttttctttcaagttagaaatacgaccaacagccttagttaagtattcgttaccatttaaatcatttaagtaaatgccagctgaatcgtaaccacgatattccaagttggttaatccatttaaaataatatctcttgcaggcttacctacaactccgacaattccacacataattttctcctttggtctagtttgctttgaagtaatggactagcttatttttattgttacagtaggtataatagtctttttgcaaaaatcggtcaagtacaaatattcaaaattggtattataattttaagcataaaaaatggctaccagaatttgctccgatagccatttttacttaagtcaattttaacttttattacttgtttttgatacccttaccttcatagctatctctcattaattgggcaatttgactgattaatggagcggatgggttagtaaccgtattttgatcgccataagcttcaacagctaattggtccaccttcttatcaaattcagctttatcaacaccatagtccttaaaagccatcttaatgccaactgattcagccaaatcaataatcttttgtaccagcttttcaaccaattctgcatcacttgaaccagttaaaccgattgctctagcaatatcagcatagtcgctttcagcacggtaaactgagtaatgtggccacatagcaagtttttctggacgcttagcattaaagcgaatgacttgtggcaaagcaattgcgtcactgacgccacttggaatatcaaaagttgaacctacggtatgagcaattgagtgttccaagccaaggaaggcatttgaataagccattccagcaatcgtagctgcatcatgcattctctttctagcatcaagatcgccatcgtaagacttcttcaagttagcgaaaattgctttaatagcttcaagtgaccaaccacgagtgaagtcagttgccatggttgaaacataactttcaattgcgtgacctaatgcttcaaaacctgaccaagcaattaaacgtttgggcagcgttttgatcatcaacaattgaaacatcaggtgttaaagcatagtcacataaggtatgtttaattccagttttggcatcggaaataatagcaattggggaaacttctgaaccggtacctgaagtagttggaatacatacaagttggacaccattaatctttgggaaacgaactactctttttctaatgtcgaggaacttttggtaagcttcttcaaaactcatttctgggttttcatagaataagcgcattgccttggctgcatccattactgaaccaccaccgatggcaataattacatctggcttgaagatgttcattctgtgaacaccatctttaattacatcagtattaggatcaagcgttacagctttgaagacttcatattccttttgtcctaaacgcttagaaataatatcagtgatttcatcagcaaagccttggtcagctacgccttcatcagtaacgataaagaagcggttaacatttggcatatgacgcaagtagttagcagcattatgttcaaaataggtcttagacggaacttttacccattgcatattgtcacggcgcattgctacggttttaatgttaagcaaatctttggcaccaatgttatgtgagaaggtgttagcaccatatgaaccagtacccaaggtaagtgatggcaacatattgttgtaaagatcaccgataccaccaagggcagctggtgagttaactaggatacgacaagcatccatcttcattgcaaactcatcaatgatctttttatcagttgagtgcaaaccagcggtatgaccacgaccaccatagtttaacaagtcagtacaaatcttaaatgcatcatcgtgattcttagcacggtataaagtaaagactggtgaaagtttttctgctgaaagtgggaagtttctacctacgcctttatattcagcgataattactttagttgtctttggcacatccacaccacaaagcttggcaatttcataagctgacttaccagctactggaccagcaaccgtaccacgacgaggatcaataaagtgttcctcaaacttcttaatttctcctttgtttaagaagtagcagttccacttcttaaattcttctttaactttgtcataaatttcagtatcaacgacaactgaattttcagaagcacaaaccataccgttatcaaagttctttgataaaacaatgtcataaactgcacggtcaatattagcagtcttttcaatgtaagaaggaccattaccaggaccaacaccaatagctggcttgcctgatgaataagcagctttaaccatacctggaccaccagttgccaaaatagtttgaacacctgggttagtcatcaaatcggtcgttgcatcaaggcttggttcttcaatccattgaacggcatccgcaggagcacctgcagcaacagcagccgcacgaatgattttaccagtttctacacaacatttttgagcctgtgggtggaaaccaaagataatggtatttctcgtcttcaaagcaagcattgccttgaaaataacagttgaagttgggttagttactggagtaacacctgcaataacacctttaggttcagcaatcttagtcaaacctaattccttgtcttcttcaattacgccgacggtcttttcgtgacgcaaactgttccagatattttctgaagcatacatattcttggtagttttatcttcaactacaccacgtttagtttcttcaacagccattttagctagtgggtaagcattttgttcacctgcagtagcaactgcttcacagatcttatcaacttgttcttgtgtgaagttagccatttgatctaaagcgacatgtgatttctttactaagttatcgaccatgtcgtagatttgctttttcttttcgtcctctgtaagagtctctttttgttgtgtcttagccattgtattattacctctaagatctactaattcttgtgaactaattcacaatgtcaactatagcacaataactttatttgtaaatgcatgaatttatgaaaatagtgaattaacacagattcacattttctcataatttcgctctaatgcaaatgaaagcgattccttaattatttgtttgtgaattaacaaacttattttaaaaaaacagatttttgatatttttttaaatctaactatagagtctggtcatactaattgataatgataaaatattaagtatatgtgaaaagattgagaacactgagggggcttacttatatgagtgagaaaaaaacacagaccgcttctggttataaacgaaccctaagcaatgcacacattcagttaattgctttaggtggaacaattgggaccggcctttttctgggggttggagacagtattcaccgcgccggtcctagcgttatcctgatatatattattgtcggtatcttcctcttcctgctaatgcgggcactgggagaactaattatgtccgacttgaacaagcacacatatattgattttattgaacaatatttgggtaaaaatattggctttatcacaggctatttgtattggttaagttggattaccttgggtatggccgaaaccacggccctaggaatttacttcaagtattggtttccaacactgaaaccttggattccaggaattattaccattgtgatcttgctgttaatcaatttaatttcagctcgtgtctttggcaacttggaattcagttttgccattatcaaaattgtcacgattattgccttcgtcatcttgatcctttacttactagtaactggtggcaaaaccagctttggtcctgttagctttgctaaccttgacgatcatggcggcttcttcgcccgtggcagtaaaggattcttacaaggatttcaaatggtaatcttcagctttattggagttgaattaattggtttaaccgcggctgaagcacaaaagccagagacaacgttgaagcgagcaatcaatcaattaccaattcgaattattttgttctatgtcatggctattttaggaattttgttagtaattccatggtccaaagttgctactaacgctagtccatttgttgaggccttaggtgctactggtattaaaaatgctagttctattattaattttgtagttatttcagccgccgtctcatcaactaacagttttttgtatagtgctggtcgattacttttctctgttacttttgatggtaaaggaaaatggaataaaacttttggacatttatcaagaaggcagcttccacaaaatgcattgactttatccgcattattgatgggatgtgcaccactaatcaccttggttattggcgatcaggcctttaattttatctcatcaacttcaactagtatgtttttaatcatctggagtttgatgattttaactcacatggcttacaggagaaaaacagcagctaatcagctaaacgattttcaaatgccaggttacccttatatcgattatgtaatcttgtcattcttcgttttaatgattatcctgctattgattttaccaagctaccgagtaccaatggtcgctgcaattgcaatctttattgttttatacatcatttccaaaatttggagtaatgaaaaagctgtttaaagcaaaaagtcgagttttttagctcgaccttttattttgcaatttttttaattattttagcaggatttccggcaactaccgtattagctggcacatctttggttacaacggcattagccgctacaacggcgtttttacctaccgtaacgccaggcaatatcgttgctttagcgccaatccaggcgttttgtttgataacaactggctttaattccagttcttttctatgctgtggatccagcttgtgattaactgaaatcaggtaggctccaggcccaatcaacacatcgttctcaattgtaatcccgcctaagtcgaccatcatcacattggcattaataaacacgcgctcgcctaatttgatgttgtgcccataatcagaataaaatggtaaccgaatctctatactagcagctattttttgaccaattatttcactaatcaattgtctaacttcacagctacaatgccgttgtgtatttaaattctgcaataatcgctgattctgttgggctagttttcgacgtaaatcgtgatcttctgtttccattattaccactcctttttcttgctctacttcagtttaaagggtaagcttatcaatgtgcaaagcttataaggtatgaagtataataacaattgtttataggtgatttaaatggaattacgtgttttaaattattttgtcgctacagcgcaagaattaaatatgacgcgagctgcacaaaaactattagtctcacaacctgctttatcgcgtcagatagcagatttagaggatgaattaggcgttaagttattcaaccgccagccgcggcacttaaccttaactcctgcaggacagtatttatatgaacaagcaaaagaaattcttactttagcttccaaaaccaagagtaacctacaatctagtgctgtcatcagtggtgacctaactattgctgccggcgaaagttttgccatgcaacgtctaatgaatatcgtcagcaacattattcgggattatcctacagttaaaattcatattctaagtggcgattatgaatttgcagaaaggcgtttagatacaggtgcagttgattttgccgtaatcattggtaatctacctttagataattatgcttctctgcagctccctgagaaggatacatggggcgttttaatgactaaggatgatcctctagcaaaaaagagtgctattacagctgaagatttagttggacgaaacgtcttaaattcacaacaagccgaaaatcgaaagtactttgattcatggttcggtaattataaagagcaaattaatatcatcggtactgttaacttgaatttcaacggtacacttttagttaaaaataaagcagctattatgctcacactcgataagctagccaatatatcagatgaatccaatctaacttttagaccaattactccaatgttaaaacagccggtaacagtaatttggaagcgagaaaccaataaatcacctgtagctgatttattcctaaatcgtttacgagtatcaattgatgacgattaacaaaaataacctagatcgaattgatctaggttattttttactttatttctttttacgactaaaacgttgcttcaatcgttgccataagcttaatgccctgcgcatatgatcagctggtacatattttcttattgctcgcaatacctttttggaatcacgtgccgcaaaaacaaatttaccatttgacttagttctgatttcaaaacgcggaatataacgtccaccaaagcggacatctgcaaccacataagttacttcattccaaggaatctgaacataatcttcaacgtttcgttcgttataaaattcaaaagctctatcgccgatcatgattttgccgtatgatgcaattcctctaaaccaggttgcatcaacagtgagatcgacttttgtattaattgacttagccatttattaaagaatgccccatacgtggaagagaacaccgacaacgaagataccgatgataatccagattggtgaaactttcttcttcaataaccacatacagaagaaagttaagagcaaaccagctaaaccaggaattaattggttcaagttgtcttgtaaagtagtaactttagtactgcttaaagctttaccgttacccatatcccattgttgaagagcggattggatacctttagcacctgatggaagcttgtcccattcgatgtaaccacccttttgaataggagtttgagaaacaattggagtgaacttgatgtttacccaacgttcaattaaggcacccaagacgaacatacccatcattgaagcaccacgggtaaccttttgaagcataccacctgacatatcactggtgatagctgaaccagccttgtaaccaaattcttgtgtgtaccataagaatgcgattctgataatattccagataacgaagaacaagataggacccattacgttacctgcaatggccattgatgcacctaatgcaccaacaattggacgaacagtgtaccagaatacagggtcaccaacaccggccaaaggtcccatcataccaaccttaacaccttggatagcgtcatcagtaacttctgcaccgttagccttatcttcttccaaagccaaggtaacaccaagaacaggtgatgctaagtatgggtgagtgttaaaaaatactaagtgtctttgtaaggcagcagataaatctttcttgtttgggtataactttctcaatgctggaatcattgaataagcgtaaccaccgttttgcattctttcatagttccatgaaccctgaaggaattgtgagtgccacataacgttaaaacggtcgcgcttggttaatttagttttcttatcagccattatataaatcctcctctatgcgttcattttaatagtcatcaatgatatcgccgagtggatcgccagtgccggcatcgccagaattattgtttccaccgttgccacccttagcttcaagagctaagtacatcaaagccattgaaaggccaatagcaccaagggcgatcaaagttaagtctttgatagcagcaagggcaaaaccaattgcgaagaatggccatacttccttacttgccatcatgttaataaccatagcgtaacctacggctacaaccatcgcaccaccgatagtcataccttcgtttaaccattgtggcatcattgcaagccaacttctaacagtacctgaagggattgctaaaagaagtgcagctgggatagcaattctcaaaccttgtaaacatacggcaatccattgccataagttgatcatacgccagttacccttcttagcttctgcgtccatgatgtgaacgatagcagttgaaatagtacgtacgatcatagttaagaacaaaccagcaacagctaatgggatagcgataccagtagcagtaccaatacccttaataccttgaccaccttcgatcaagataatagctgaagctactgatgctaaggcagcatctggtgcaacagcggcaccaatgttagcccaacctaaagcgatcatttgtaatgaaccacctaaggcaacacctaaatccaagtgaccggttactaaaccgatcaaagtacaagcaactaatggttggtggaattgccattcatccaagataccttccataccggcaagaaaggcaacaaacacaaccaaaatcatttgaatagcgttcatttatttactcctaattatttattactttttttcgtcaagtaaagtttgagccttcttcaagatagcatccatattacctggagcatctgaaggaacttttcttacatcaaacttaacgcccatcttttcaagttcacggaatgtatcaacgtctttttgattcattgataatacgttgttggcgttaacatcgccttccttatatgacattgaaccaacgttgatattcttaagatcaataccgcctttgatagccctcaatacatcttctggattttcaaacaaaagaagtgcatgagtgtttccaaatcttggatctttagcaatttcttgcatcttcttgagtggaacagtatgagccttaacacctgctggtgcagcttcacgaatcatactcttacgtaaatcatccttagctacactatctgaaacaacaattactctatcaggcttcatagctggaatccaaccagttgccacttgaccgtgaagcaaacgtgaatcaattcttgccaaaacgtacttgatatgaccatcaccaataacagtaccttctggaatgctcttcttactgcccttagcagcagctttgtcagctactggagctgcagcagccgtcttaggcattaagtcagctggcttagtcttaattccatctctaccaggttgaacaactgcagtggcgatgtgctttgcagttgcattagcatccatcattctctcagtcaatgcttgtacaaccattggtaaattcataccagcaacaattgcccatttatcatgcttttcagcaagccaatttgcttggttaaatggagtaccaccccataagtcaaccaagaacaaaacttcatcttggttatcaaatgaagcaattgctttttccattttgccacgaatgtcatctggaccttcatcaggctttaagataacatgtgcaaaattatcttgttcaccgaaaagcatttgtgcagattgtgcaataccatcggcaaagccaccatggctggctaaaacaattcctaccatgtaatttcctcctctagatcaaaaaatgaatccgcttttattatacgataaatatagactttaaaaaagtgttttttgaaaataatttcataaagtgccaatttgtttcaagcagtccaaatgccttgtctcccaagcaaagacagaaattagtctaataaaaaaagaaagcctgttttcatgatttgagtcgtttttcacaaatttggcttcctattaaaatatatgctggttggataatttcattttcataaaataacaaaaaaggaagccttccgcttccttcttccctttactccggctgtcagactcgaactgacgacatcttgattaacagtcaagcgctctaccaactgagctaagccggaatattaaaaaagagcacggcagcttcctttcctcgcaggcagttgcccaccaactactttcggcgttaagaagcttaacttctgtgttcggcatgggaacaggtgtatccttcttgctttcgccaccgtactcttttgagcttttacactcaaaactaaacataatccttctcgcaaaaaaccttccagtttgcttcgctttggtcaagtcctcgactgattagtactggtccgctccatccttcacaggacttccactcccagcctatctacctcatcgtctctgaggtgtcttactgcttacgcaaaggaaatctcatcttgaggggggcttcgcacttagatgctttcagcgcttatcctttccgcacatagctacccagcgatgctcctggcggaacaactggtacaccagcggtgcgtccatcccggtcctctcgtactaaggacagctcctctcaaatttcctacgcccacgacggatagggaccgaactgtctcacgacgttctgaacccagctcgcgtgccgctttaatgggcgaacagcccaacccttgggaccgacttcagccccaggatgcgacgagccgacatcgaggtgccaaacctccccgtcgatgtgaactcttgggggagataagcctgttatccccagggtagcttttatccgttgagtgatggcccttccatccggtaccaccagatcactaagtcctagtttcctacctgctcgagttgtctctctcgcagtcaagctcccttatacctttacactctgcgaatgatttccaaccattctgagggaacctttgagcgcctccgttacactttaggaggcgaccgccccagtcaaactgcccacctgacactgtccctggcctggcttacaggtcgaggttagagcatccttcaaacaagggtagtatcccaacattgcctccaataagactagcgtcctatcttctctggctcctacctatcctgtacatgtttaaaagatactcaatatcaagctacagtaaagctccatggggtctttccgtcctgtcgcgggtaacccgcatcttcacgggtattataatttcaccgagtctctcgttgagacagtgcccaaatcattacacctttcgtgcaggtcggaacttacccgacaaggaatttcgctaccttaggaccgttatagttacggccgccgtttactggggcttcaattcaaaccttcgcttacgctaagctctcctcttaaccttccagcaccgggcaggtgtcagcctctatacgtcatcttacgattttgcagagacctgtgtttttgataaacagttgtttgggcctattcactgcggctaaccaatctcttggctagcaccccttcttccgaagttacggggtcattttgccgagttccttaacgagagttctctcgctcaccttagtgttctccactcgactacctgtgtcggtttgcggtacgggtatgtcatctctggctagaagcttttcttggcagtgtgattaccacaccttcgctacttttaattcactcctcttcacaactcgtgttgctggttagaagcatttgactcttaaccgcacttgttgcttgaacatcgttccatcgcgatgcgtgcttcacctcctgcgtccctccttcgctcttaacgatttgacacagtacaggaatctctacctgttatccatcgactacgcctctcggccttgccttaggtcccgacttaccctgggcggacgagcctgccccaggaaaccttagtctttcggcggataggattctcacctatctttcgctactcataccggcattctcacttctaagcgctccattgatcctctcgattcaacttctccgctcttagaacgctctcctaccacgtgctctttaaaacacatccacagtttcggtactatgcttagccccggtaaattttcggcgcagcgccactcgactagtgagctattacgcactctttgaatgatggctgcttctgagccaacgtcctagttgtctacgcaactccacatccttttccacttagcatagatttcgggaccttaactggtgatctgggctgtttccctttcgactacggatcttatcactcgcagtctgactcccgtgtatggatatctggaattcgtagtttatctggattcagtaacccctgacgggcccctagtccaaacagagctctacctccattatcctctccacgaggctagccctaaagctatttcggagagaaccagctatctccaagttcgtttggaatttcaccgctacccacaactcatccccgcaatttttaacttacgtgggttcggccctccagtgcgttttaccacaccttcagcctggtcatgggtaggtcacttggtttcgggtctacgtcacctaacttttcgccctattaagactcgctttcgctccggctccgtcttttctgacttaacctcgctagataacgtaactcgccggttcattctacaaaaggcacgccattgcactttaatgtgctttgactacttgtagacacacggtttcaggttctttttcactccccttccggggttcttttcacctttccctcacggtactggttcactatcggtcactaactagtatttagccttgcgagatggtcctcgcggtttcaaccgggattcctcgtgtcccggcctactcaggattctgctaggcgtgcttgagatttcgcttacggggctctcaccctctctggcttaccttcccagataattcaactatctcttacactgccacgtcgcagtcctacaaccccaaatgataaatcacttggtttgggctctttcctcttcgctcgccgctactaaggaaatcgatctttctttctcttcctgcagctacttagatgtttcagttcactgcgtcttcctttgattagctatctattcactaatcaataatgcatctctgcattgggttcccccattcggatatctccggatcactgcgtacttaccgctccccgaagcttttcgtagttcgtcacgtccttcttcggctgttagtgcctaggcattcaccgtgcgcccttttctacttgaccttactcaagaattctcttctcggtcgctctacaatctgttctctttgattgtctcggttttttgcttggattatattcagttttcaatgtactagctctttgatcctttttctggatcaatggaggctaacgggttcgaaccgatgacctcctgcgtgcaaagcaggtgctctcccaactgagctaagcccccagagtattttattttcggccagacataactttaactctttttcttcgttatgtcaatgggcctaaatggacttgaaccatcgacctcacgcttatcaggcgtgcgctctaaaccagctgagctataggcccgactaacgcttggcgtttttccaatctttgaggtactaccctcaaaactaaacaaagtttctcagtgtgcttccgcttgctctggatacttctcttagcattcctgctctccatatccttcgcttccttagaaaggaggtgatccagccgcaggttctcctacggctaccttgttacgacttcaccccagtcatctgccctgccttagacggctccttcccgaaggttaggccaccggctttgggcattgcagactcccatggtgtgacgggcggtgtgtacaaggcccgggaacgtattcaccgcggcgtgctgatccgcgattactagcgattccagcttcgtgcagtcgagttgcagactgcagtccgaactgagaacagctttcagagattcgcttgccttcgcaggctcgcttctcgttgtactgcccattgtagcacgtgtgtagcccaggtcataaggggcatgatgacttgacgtcatccccaccttcctccggtttgtcaccggcagtctcattagagtgcccaacttaatgctggcaactaataacaagggttgcgctcgttgcgggacttaacccaacatctcacgacacgagctgacgacagccatgcaccacctgtcttagcgtccccgaagggaactttgtatctctacaaatggcactagatgtcaagacctggtaaggttcttcgcgttgcttcgaattaaaccacatgctccaccgcttgtgcgggcccccgtcaattcctttgagtttcaaccttgcggtcgtactccccaggcggagtgcttaatgcgttagctgcagcactgagaggcggaaacctcccaacacttagcactcatcgtttacggcatggactaccagggtatctaatcctgttcgctacccatgctttcgagcctcagcgtcagttgcagaccagagagccgccttcgccactggtgttcttccatatatctacgcattccaccgctacacatggagttccactctcctcttctgcactcaagaaaaacagtttccgatgcagttcctcggttaagccgagggctttcacatcagacttattcttccgcctgcgctcgctttacgcccaataaatccggacaacgcttgccacctacgtattaccgcggctgctggcacgtagttagccgtgactttctggttgattaccgtcaaataaaggccagttactacctctatccttcttcaccaacaacagagctttacgatccgaaaaccttcttcactcacgcggcgttgctccatcagacttgcgtccattgtggaagattccctactgctgcctcccgtaggagtttgggccgtgtctcagtcccaatgtggccgatcagtctctcaactcggctatgcatcatcgccttggtaagcctttaccttaccaactagctaatgcaccgcggggccatcccatagcgacagcttacgccgccttttaaaagctgatcatgcgatctgctttcttatccggtattagcacctgtttccaagtggtatcccagactatggggcagattccccacgtgttactcacccatccgccgctcgctttcctaacgtcattaccgaagtaaatctgttagttccgctcgctcgacttgcatgtattaggcacgccgccagcgttcgtcctgagccaggatcaaactctcattttaaaaagtttgaatgattgctcattccttatttaagatctttgtctcaaatttattgcttgcgaattgacttcgcttcttgtttgggtttttacacccgcgcacttttagcgaaactttgttcagttttcaaagtactacctctgtcttgcttttttgcaaagcagacagcttttatattttatcaaaccatcatttctttgtcaagaacttttttgatttgtttttttcgtcttgctcaagctttttctgctttcacctgacgacatttaaatatattaccagcttatttacttctttgcaagtactttttttctttttatttgttttctttccttacatgtctgtttttaagctctcgtcgcatctctcgaagcgactttattaatttaccttattttctccgctttggcaagtcttgctcttcgttcgcaatcttttagaaacgcttggacgcgctgtaattatttctttatttctatttcaatctacctttttctttttgcttactttatttttatccttacgcttattattcgagttttactgttttttctcttaattttagtacaaaatttttcgaaattttttcaaaataattcaaaaaacagtgttttgcctaatttttcactcaaaaatgcaaaaaaagacgtttatcaaattgatatagtcctactttagtagacagtacaaatatataaaattgtactatctatgaaagcaggactttttgtatgtctagaaaaagtaaatttagctatgaagctaagcttaaagcagttaaacaatacataagtggcgaagcatcacctgcttcaattgcgaaagttttaggggctggcaagactacactgcgccaatgggtatatgcatttaaagatcatgggccagaagcattaagaccacataaatataatcaaagatacagtaaagattttaaactcaaatgcatagctgcctatttaaatggcgaaggctcatatgattatctaacaaataagtttggtttgcgaagtgctgcacagttaaagcagtgggttatcaagtataatagtcatcaagaactcaaggactacaatcctattctggaggcttatatgactaagagaaaaaagacaaccctagaagaacgtaaacagatagtgaaatactgcaaggatcatcaatggaactacaaggaagcagctcttaaatttggctgcagctatgcccaagtatacaactggtcaaaaaaatacagcgcaaagggaactgacggcttagcagataggcgcggtcatcgtttaaaagaagctgagctatctgaaactcaaaggctaaagcgtgaaattgaacagcttaaaaaagaaaatgatattaaagaccaagagatagccttcctaaaaaaagtgaaggaattagaaaggatgtgtttgctggacagccaaaacaaagacaaatagcacttaaacaacagcagcgaaattctctttacagtttgatcaaagaatgtcaccgagaatataagtggtcaattgaatggatgtgcaaacaagccaatattgcccggtcagcctactacaaatggcttaatcataagccaagcaaacgtgaactaagagatcaaaagattcttaagcgtattaaagaaatagctgagagcaataacagcctctttggttctcctaagatgactttggctttaaacaatgagctagcagacggtgaggccaaaatataccgtagaactgtggctcgcttgatgtgcgtgaatggcatctatactagcaaggccagatttaataagaggtatcgctatcaagctgctagaccggaagaaactgccgaaaatctattgcatagagacttcaatgccactaaacccaatgaaaaatggtgcactgacattactgaagaaaaaattcctggaacaagtcaaaagatttatctctgtactatctttgatctatatgatcgtttccctgttggctatgctttaagcaagcgcaatgatacagccctagttaacgctgctctgtcaactgcttggaaaagagagcccaatagtcatgcaatgcttcatagtgatcgaggatttcaatttaccaggatgccttttaagcatgagctagaagaacatggcatgccacaatcaatgtctagaattggccgctgtattgataatggcccaatggaaggctggcaaggtttaattaaagaaatgcgagaagttctttatccgaaagcaaatagctatgaagagatggaaaaagcctttaaagcaagtattgaatactatattaattatgatcctcaggagcgcttcaatggcaagagcgcaggtcaggttagaaaagaagctaagaataatccagagaatataatttcatatccaataaaacaagataaaagatataaagacttttggaaaaagattgatgaaaagaaaaatcagctcgcacaatagcgaactgattaatcaaattaatttatatatttaagctgtctacttgacacggtacggatcaaatataatcattcgataaacgtctcattttatatctttagatgatcaatctttagtgtctattcatcttttttcttacgtttttcaacgccaagtaaactaatccaacctaaaccagcgagtaatgtaccaatcaaacctagtgtgtgtttgtgttcactaccagtttgaggcaataaatcttgcacggacttcggttttgcatttaatttgttagctaattgctttctttctgttttccctattgtcctcttgccagattcaatgtctgctgccttaactgggccgttagcgcgtttctttcgacctgtaggcataccttcatgcttaggattgttattagagtcatagcccttcttatttgctttagaatgattatgcttcttttcactttccttatttggctttgccggtttatctggcttcggctctggatttggttttggcttcggttgaggttctggttccggagtaggtacttcatcttgcttgtaagtaattttaatattactatcagccgtatctactgaaaccttttccgctgccaccttactttgtgaagcagtgtagccactaaatgttggagcagtatatgcatcccactgagtattaccatctaccctccactcactgtatgtaactttgccagtaactttatcaaacgttactttttgcgtggtaatcagcttaccacctgaaggcgtaatgactgtaattattctagttggagtcttagtcaaagtatccaagtgatcatagttcttacttggatcaccttgcactgggcctgttggaacatcccttggtggagtttctggagtaacgataatggtgtcgtgttcaacccttacagttacagttggaatgccatcagcagttgcaactactgtcttagaaatatcctgtcctgaaacaatcttccatcctgctagagcttgtggatttacatctactgtttcactggtcttgccactaagcggagtttgccctacttctttgccatcactatcaacgtaagaaatcttccccgtttgagtgttgacagtataagtagcagtgacttcactattggcaaccagctttccagtaaccaagtcatatacggcagtccgcgtaaattcaacggtctgtttcttttgatcttctgaaatctgagctagttggcaattcttgatctggtgctaactcgtagttctctggaagcttcaaatcaaggttatcaacagttgagccagcaacgccagacttagtaattgtctgaccaacttgcttgttaccttcttgagtatcttcaaattcaatagttaaagttgcatccaaagtaaacttagcctttgaagaaatattcagcttgtagtttggatttgctttttcaagggcagtaatactttctggagttaagttaattacataaacgccagattcagctggaattccatttgcaaattcataagtcaaacctgccggaactgtaatagcagttggaacattaactttaaagtttgttccatcaattactggtacagtgctttcttgactaccagaaatcgttacattttcttcagctggactaattacataagtgaattgaccactttcagaaactgcatagttaggattatcatcttgcaatttcttcaatcccttagcagttaaggcaatgtagtaagtaccggcatttgttggcgcagaaattggcttaccattggcatcgacccattcataatcaccagctgctaggttagcagtattcaacatttcaccgcttactaaaccagttggagtgaatacaccgaagttggtagcttgagtgttaatcgttgcaggttgaccatcgtacgtcttgccatctgcgcccttactattaccgtcaagaactacattaagatccttttgtttaattgtgtaagtggcagagcctagcaggtcttcagcatccaaggtgacatttccttgaccagcgtattggttaagggctttttgcaagttaacaataccattggcactcagcttaatcgtgtaagtaccagcattaactggtgcgctgccagcattccaaatataatcaccgtcttgcagagcatacgtactttcggtagttgaacctgggaaagtaaagtgaactaaaatttgaccattgctgttaacttgtgcagttgttacagctgtaccatcaaatgtcttttggttagagccattaagttttgcgtcagcagtggctgcagtaactatgtagttagctgttgtcttaaatgtccacttgtagttagcaccattattaccagttagttgcttaagcttttcttgaccagcctgtgacaatttaacttggtaagtaccgacattcgttgcattaccaacaatttgcaaatcgtcagcagttaacttaagtgtctgagcttcaccatcagcggagtaaaccgtcgcatcgtaggttacgttgtacttattcaagttaagtccacttggtaaggtttgcttagcatcataagtcttgctgtcaccactattcagggtaacagtagcttcgccctggttaatggttaatgtacccttagtagttacatcagctgctacttgtgggtatgcgtagttagtacccaaagctttttcaatgttatccaacccttgcgcagataattccacgtggtattcaccgacattgcctggggtttgatcaaagatcaagtcaccacctttagcagtgtagcttaaattagtactattagtactatttttaccatacgtatatttacaacaacataatccttgcctggatcaggaacattaacttgccaagtttgtccagcttctttaggtaggctccatgaaccataaatcactttaaatcctggcgttgttgaatcacctgctgtttgatcccattgccaattaccataagtaatcgtgttattagcaacatttaaactaccagtctgggcatagaatacctgtatttgtgaatcaggtgcaaattgttgaccattcttgtcaccaccagcaattacatatttagccgttactgttctcgcttgctgttttactggaatatacaaaacagtgtgaactggacgggcttcataaactgaggcgttctcagtatatgctagagactccttaccctcactagatgtatcttccttattccaagttgggtaaacaaattggtttgctgacctggatcgccgctcttattgtaagcactataagaaacttccttattattttgagtagaaacatctttagtatcttctggactagtagcttttttatcttctgcctgtttagttgaattctgctcggttgaatttttgctagtcaaaggatcggtaccgctaacttctttttgagcagtagtatcgttatcattcttatcagctgtcgtagtctgatcatttccagtatctgtggtagtcttcttagccgactcaacctcttctgtttttactggatccgtagtatccgcatgaaccgtttgacttgtattcatcgtccaaagcaaaacggaacaaactccaatgttcaattttctaatactaaagcgctgcttgccttcaaagtcatttttattaaaagtcatagtctctcaatccccttaagttatgttttatctctaacttatagtctttctattacgcggttttattctattcatctattttaatcacaacaaaaaagcaggcttaaattatatgcaaaaaaatcgttattttaagttgtcagtcacaacaactaaaataacgattttattgtgctcattttttaattaaatttaggaattaaattaaacctgattctttagtaatcttcttcataccattcatgtaaggaacaagtacatcaggaacagttactgaaccatcttcgttttggtaattttccaaaatagcagctacacaacgaccaacagccaaacctgagccatttaaagtgtgtgccaagtgaagcttgccgtcttcatcacggtaacgaatttgtgcacggcgagcttggaagtcagtacagtttgaacaacttgagatttcacggtacttgtcttgtgcaggcatccaaacttcaaggtcgtaagtcttagcactagtaaaacttgcatccccagttgaaagagcaactacgtgatatggcaagcccaacttttgcaataagtgttccgcattatgagttaacttctcgagttcatcccatgactcgtcaggctcacataccttaaccatctcaaccttacggaattcgtgcattctgatcaaaccacgagtgtcccgtcctgctgaccctgcttcacttctgaatgctggtgacaatgcagtaacattgattggcaacttgttttcatgaataatttcatttctgaagtagtttaccaatggaacttcagcagttggaatcaaagttaagtcacgtggcttatctggatcgtcattatcaacgatggtataaacatcttcgtggaacttagggaattgaccagttccttgcattgatgcatcgtttaccaagtatggtgggataatttcggtataaccttccttagtgttttcatcaaggaagaagttgaagacagcacgttccaaaagcgcaccagcaccgatgtagtaaacaaaacgtgcacctgaaacctttgaagcacggtcccagtctaagatgccaaggtcagtaccaatatcccagtgagcttttggcttaaagttaaattcagtagttgggtgccacttacgaacttcttcgttgtagctatcgtccggaccaattgggtctgaatcagctgggaagttaggcaatctaagcaagatgtagttttgcttttcagttaattccgcaacttccttatctaagtctttgatttccttacctacttcacgcatagcagcaattgcatcgctagcatcttctttgttacgctttttttctgcaatttgcttagaaacatcgttacgcttagcttttaattgttcactcttagtcaaatcttgacgacgcttagcgtcaatttcaactaattcatctaattcttctggcttaatgccacgtgtagccaactttttctttgaccaatcaagattctcacgaatcactttaatatcaagcatataaaacctccgtaatatgcaaaaaagagccgacttatccctacacttgggacgaatcggctcttacacggcttcgcggtaccacccagcttcagtctatctagactgcacctctttaccagacgagtaacgacgtcaaaccgtgcaactattaattgcccacattattgaaatctggaagcgactatgcattcactcgcaccaaccgtgaactctctgaagcagtcttaggatttcgtgtttgcatttattttaagccattcttcttttttgagcaaataatatttttctttaaacgaaaaaagtgcactaacttgtgtgtaatcgacagtataaacatactgaaatcctagtattttaagcaatttctgtgatttttcattatcggcaaaagttccagcccagacttctacttgctttttctttttaaaagcataggtcaaaatcaattgtaaagcttcagtcatatagccgtgaccttcaaacgactgatctagcaaaaagccaacttctttagtctttaataggccactcttttcatctaagccgcgttcatacaattcaaccagaccgatcacttcattgttcttgcgcaagcaaacgacataactttcaggacgcgacatatattgcttcacgccattaaccgcctcagtcagattgcgatattcctcaaagccagccatcttgtggtagcgcggattgccaccccacttcaataactgctgtgcatccttttcttcaaaaggtctcaaatatattctcttagattcaagcattagttacccatcagcttcaagagccactttgcaccaaactgtaggcctatactataggcggcaattgtccatggcttacacaaaataataatccaaaaataagtccaaaacttcattttagtcaatcctgctagcaggcaaagcacgtcatcgggagctgctggggcgagaatacataatgcaaagaaccaattaaatttattctgattctctgtccacttcatatatttatcaagcgtttcttccgaaacaatatgcaaaataaagggccggccgtagtgtctagctaaaaagaagttgataattgagccaatacaaatccccacgtagttataaataaacccagcaaccgggccaaagaagaccacgcctcctaataaagacacgcccccaggaataatcggaataactacctgaacaatttgaatcaacacgaaaataatcggaccaacaatttgtttattagccagataagcccgcattttagcttgatcggtaaagatccccaaacggtaccaataaatcaccagcaacacgattgcgattccacaaactatagttgcaatattgattaatttacgactagccttagtcgatagatgcattttctcgccttccttcatcgcctagtagttcaattttaacaaaaatccagcccagataccgtaaacatgcaaatctaaaaaaagttttattattttagctactttgggcagatactatataataaagttaataagttattagaaaggtaggcatcttatggttgtaattaagaatgatattgtttatgacaagactaaagaattaaaaacggatatttactatcctaatgatacatcttctaataccaagattttaatcttctggcatggcggtggctggtttagaggtaataaagaaagcgtaaaaaatctaggtattcgctttgctaatgcgggctttatgaccttcatccccgactactccttagcacctaaataccactttcctgctgctaatgaagatgcattgcactttgtcgactggctgttgaattctgaatacactgatcaagacgatatcaaaaacattgttcaaattggagccagcgttggcggtgaaatggcaattgaggttgctgggaaatacggtttccctactgtcacctggtctgctccagttgaatattcaaactggattaaagatcatcaagatactaaagcatccccagatgccgctaacgattttggcattaccgatcctgaaaagatcagacaatctttctacaagtacttcacattaacctacacaggtactgaagatgaggctgtattacaaaaattagacgctaagtcatttgactatagccatctcaagcaattaatgatgattaattccgcagatgagttgacaccactagctacagtattggattttgttaagttcttagctgacaaaaacttaggcgtacagctcctcgtaattcctggtcacggtcacgccatggcttatggtcccgattatgtagatgaatcactcgactttttatatcaaactattaagagacaaaattaagtatgattaacatccaaaaattcgttcaagtcagaaagaaactaaagttatcacaaactgagctttgccaaggcatttgtacccagtcgaccttaagtaagtttgaaaataatgggcaagtgccttcatttaaaattctcaagcagctttgtgaacggatggatattgatgttagcgatattatggacagcagtgagcacaaatatatcgcgcatatcctgtttgaagcggattttgcttttatcaattttgattacagtaaaatttttactttactttcacaaatcaaccccgaagtagacctaaaacgccaaacaaatcggattcattatcactatttgcgcggacaatatgctctaagaagtgatcgcaatcaaatgagtgcgctcttttatttcaacaatatcttgaccacccaggaattgcctgaaaatgatatttaccgcttgttggcattaaatggttgtagtcaaatctatgctaaacaaggtgaaacagagaaagccgagcactattatagtcaagtattaaagaacattatggacgtcaagatcgataatattttgactacaatgcatgccttaagtattttatgtgatgccggtgaattctatggcgaacgaaaaatgtatcgtgagtctaatgcattattgcgctatgcctataagattggcgctgagaagcacgtgattttttacatggcacgcatcctattgcggcaaggcatgaatgatattgatcagtcaaaaaagaaagcaattgctatccaacatttgcacgatgcctgtgcttttgcccgaatcaaccgcaacacgattacgctaaatcaggctaaaaaattactaaaacaattaaatggctaacaaaaaatccccaaaattggggattttttagatgatcttataaccagtaaccggcttagcaggtactgcattaaaatcatacctagctaattgttcaagctcagtattgccatcaataattgtagttacgccttgcgcaagcatcaggttcattactttatctttattaggatccgtggtaaatggcaccagtactactggcttatgcaaagcacgtataaaaccaatttcaaaagcactaccatcatcaatgttatccatatcatacaagaaaacaccgcaggtagcattaacgattccttccaaatcattattatatgtagcaagacgccaagtcatgctacggatgccaccaatttcaggattcttttcatccgggtcaacaaaattctgatcaaacgggaaatgcactctgactacagttggattttgttctaacaatgcccgtgcttgatcaacgcgagcgcgttgttgatcattataaaatggtgagcctaaataaatcttagcggttgaaactgattcggtcatgcttttatcctttcgtgactaaaaaactattaaattatttttcattctagcatgtcttttttacaacgaaaagcccaaattactgcgtttttactgcaaacgctttataatagaaacataacttattgaacataaacattaaacttattggaggaattattttgtctagatatcaatcaattaatccatataccaacgaagaatttgcaagctatgataatcctactgccaagcaaattgacgatgcgattaatttagcccatgctttatataaaaaatggcgtcatgaagctcctgaaactcgcgctcgtcaattacacaaggtagcagataccttgcgcgaacacgaggatgatttagccaaaatgatgactctagaaatgggaaagcttttacgcgaatcaagagaagaagttgaattatgtgcttcaatctgtgattactacgccaaaaacggggtcaagatgttggctcctaccccaattgaatcaggcttaggcaatgcctattacctgaaacagtcaactggtgtcatcatggcctgcgaaccatggaacttcccgctttatcaagtgatccgggtctttgctcctaactttatcgtaggtaacccaatcttactgaagcacgctcacaatgtccccggctctgctgctttgactgctaaaatcatcaaacgcgctggcgctcctgaaggcagtttgattaacctttatccaacttatgaccaactaggtaaaattatcgcagacccaagaattcaaggtgttgctttaactggttcagaacgtggtggttcttctgttgccgaagctgctggtaaaaatttgaagaaatcgaccatggaacttggcgggaacgatgcctttatcgtcttagatgatgctgatccgcaagtattgcgcaacgttttaggcgatgctagaacttacaacgatggtcaagtatgtacttcatctaagagaatcattgttgaaaaatctcattatgaggaagtattacacacgcttaagaatatcttttctagtcttaaagctggcgatccacttgaagctgatacgactttgccaccaatgaattccgaacgtgccaaggaaaaattagaagctcaggttaaaaaggccgttgatgcaggagccaagattttttaccaatatccagagattgattctaaaggtgccttcttcagacctgtaattttgactaacatcgacaaagaaaatcctatttacgatgaagaattatttggcactgtagcagaagtctttgtagttgacgatgatgacgatgccattcagcttgcaaatgattctagctatggcttaggttcatctgttatctctaacgatatcgaacgtgctcaaaacgtggccgctcaaattgaaactggtatgactgtcatcaacggccgttggattacttctggtgaattgccatttggcggtgtgaagaagtccggctatggccgtgaattgagcgaattaggcatgatggcttttgttaacgaacacttagtaattgatgttactaaaaataatcaatagtaattttgggtaaaacaaatacgctggcaactggcacaccagcgtatttttattgctcatttttagttttatttttcttaaacagattataaccagctaaaatcgtggttaacacgctagccaaaatcataaagtaagctgaagctccaagggaaactgcatatgacataagttgactggttaattgagccagcaccccagttgaagcacctactgcgcttgatatttggaaaactatataaatcaaaaagactgattcaatcaaagaaaggaaaaagaccaaagtttggctagccttagtatttttcaagacattataaataatgaaaatcgggaacaagaataataacagccaaacaacgtaaagaatgagtgcataccatgatgttgcgccagatgaaagtaaacgtcctgctaaactgaacaatacgttagaaatagacattctctgagtataaaatgaggcacccgaatcagtaaagagaacaattaaactgactagcgctgtcaaaatgaccgaaatctgcacgtaattgaagtggtgcttgcgaccatcttttatttcacgcacacgattttctacccgcggatgcttttgaacaaactctcggtttttctctttaactttgcttccacgagcatcaactcgattaaaaacttcagagccgattcgatcaatcttttgcgtcaaccgtttatcaaccgtatactgctcgatcttatctttacgatcacacacaatataaagccaaaccattaaagctaaaaagctggtccaccctgctgctctagagaaactcattagaattaagagcaaaacgcccaataagaaaactaaagtagcattttttctaacccatgcaatcattctctggacagtagagttttgcttttcaggaataaattcttcccgataggctgcacggctgataatcttttcgccttcatctgtttcttcaaactttgctttttggtgctgatctgtgaaaaagtcgtctcgatatttttttagattgaagccacagtttggacaaacatcatctgtttcactaatttcatggccacaatttggacaagtagtcatataagaattcccttctttttcaatatgttaatgattattataacatggatcgaaatttgagaaataaaacaaaaaagaccgaacccttacgatttgtactgagacgtaaaaagtagacaattaaaatattggattaatagaggcttgacttcgatactctttcggggttaagccttttaatctgctctttatcctttcgttgttatagtattcgatatattcctcgattgcttgagttaattcttgaagattatgatacttgtattcttgatcatagaacatttcagttttgagcaggccaaagaagttctccattagcccatcatccatggagttgccctttctggacatgctttgagtaataccatggagttttaaagctcgctgataacgagggctttgatactgacagccctgatcagtatgaaaaatgcagttattaagagctgtttctttggcaaaagccttgtcaagcattgtcattactaaatccatatctggatgtttggagatagtataagaaactatatcgccaccgcagccgtctagaataggcgataaataaagcttttcattattaagatgaaattcagtgatatcagtataccattttgtgttaggcagggctgcgaagaaatcacgatgaattaaatttggagctattttgccaatagtacctttatagcttgaatatttgcgcttattgcgcctgatgcctttaagacctaatttatgcatccaatagcgaacggttttctccgtaactttccagccctctctgattaactgcaaagctactctgcgatatccatagcggccttgatgatgattaaaaatctcatggattctagcaataagctttgaccgtttaggcttgacgggctgtcgtttgataatcttgtagtatgagcttctggcaattataggtagctcagggtgctctgcaatcgcagctaatacataatttaaactaactttgaattcttgccttagatccgtaatcaccctagctatttcttctgatcttcttggtccaaggcacttagtttttttacgtattcgttcacaatacgcaatcgcaagttttcttctttcagctgctggatctctttctccagttccttgcgagatttctgcttttctttggtcacgggcagggcgtcctttctgtttgataatgacattatacccgtttttcttatattctctaatccaattgttaagcatgccaatacttttaaaccccagttccaaagacagctgtaagtatggtttattgccaaagattgcttgttcaatagttcgctgcttaaactctttggaatagctttggtttttagtagttaaaatttctattccatgcatatcaattaatctaagcatatagtctaaattagctagattcattctgtacgctttagccaattgactgattgagatattttcatctttccatttatgataaatttctattttttgttctttattaaatttagacatagtaaacattctaagctaaatagtgaattagttatccgacgggataattgattcactatttttattcttttgtagaattaaagtagtggtaaaacgatatgccctgaggtctttagacacttgatgtcgcataataaactggcagttttacttaagttttcaatagtctcttcgaagaatgtggacactagatgtcgagtttagaaaattagatctgatttcttaagtaaatacgttttactactaagttttggaggtttttattatgcaagttacttttggaattgatgtaagcaagtctacttctactgtttgtgaactaattggtgaaagcaaaaatgaactaaccattactaataatcgtcctggttttattcaattgcttcatgaattaaccgctttttctaaacatccgcaaattatttttgaagctaccggtgtttattcacgcagactgcaggcttttcttgaagactacggctatgaatatgttgttattaatccgcttaaagccaaaaaagagatgaatatggggctacgctacaacaagaccgataaaactgatgcttatcatttagctttaattcaaagactttatcgccatccggttaatcaaagcgaatcccaaacttataagcagcttaatgctttgagccgcttctatgaccagctgacaagtgacttggtaatagctaaaaatcgacttcaccaagctctacaatcgacttttcctgaaattgaaaatttattttcttctgctagaggtaaaaattactggcaaatagttgtgcgatatcctcattgtgacttagtaagaagagaagataaaaaacagcttattaactggttaatgagcttaaaggggattgcttttaaacacgctctaaggactgcagataaattaattgaattagcttatcaagcttatccagttgtatcttgctctagcatagaagtcgagcaagtgcagtattatgcacacagattgcttaatttaagtgatcaaagagaaaatttaatcgcaagaatggttaagttagcgaagtctttgcctaatcatgatttagaaaacctagaaagcattccaggctttgcacagaccactgctgtcagagttttagcagagttaggagatttacgcagatttagtaatcctaataaaatcaatgcttttatcggaattgatccaggcagatatcagtcaggagaaatggactctaatttaagtattactaaacatggcaatgcagtcgcacgtaagttgctttatcgagctattggacaaattgataatgcagctaagacaaatccgtgtcatatagcagattattatgaaagcaaaaagctatcctctcaaaccaaagggttcaaaaagatagctattgcttcaattcataaactaatcagaaccatttatgccctgattatcaatgatcaaccatatgattacaacgtagccacacataatcaaaaagactttagtcgtaattaattgatcaagtacattataacgctaagcccaaaaatcagatatggatctgggcttatttgtcgtgtctaactaaaaaaataaatcgacactaaaagatgtttaagttgaaatttaaacaaaaaatgaagccaaacttcttattatgcttgactttacgtagaaaaagacctaaaagtgtctaacttttaggtctcagttcaattcgatctgaaaaactatttattaattatttttcttttttcttcttttggcaaacttattaaggtcaattccctcatatgtcaatttagtagctgctgacatagtaattggcaaaatgaagaccaagatgagcaaaccaatatccacggctaaggcaacttcaatcaaagttggaatacctgatggaatcaaggctgcaaaagtaccacctaagataattgcggctgaaacaacaaccgtaccaatgatggcacatgccttcaagattcttgaacttggagtagtgtagccttcagactcaagttcacgataacgagtcatcaggaagatactgtagtcaacacccaaagcgatcaacataatgaagctgaagaatggtgtgttccaagtaagcattgacttaccaagaactgctttaacaatccattgattgattgaaagtgagcagaggtaagcaataagcaaagtcccaagaatgtagattggttgcaaaagtgaacgagttacaaacatcaaggcaatgccgataccgattaacatgatggcagcagttctaaggaagtcgccactggcaactgtcttagtatcttcaatcttggaactttgaccacccatagctaccttagcattcttcaaagcagtaccttggaatgacttcttagccatagcacttaattcttgtgacttcttagtagcttcggttgcacttgggtttgaatcaaagacaacaataatttgagctgacttcttgtctgggctgaggtaaacatccattgacttcttgaacatatcgttcttcaagaattccttagggatgtagaaagtatcagcggcagctgatgaacctaaacctctgaggtaggtttcaccttgacctaaaccactattaacagtgtcaatacctgaagtcaattgtggaactttgcttgccaacttaccagcgccagcactgagttgtccagcacctgtgttaagttgactgatacctgaaataagttgtggagcttgaccagctaattggccgataccactattaagctgaccggcaccagtggcaagagtacctaagccattattcaaagttccagcaccatttgcaagagtgccaagaccattgttcaacgtacctgcaccgcttgcaagagtaccaagaccattatttaatcggctggcaccattattaacttggtttacacctgcaccaaggcgactagcacctgatgaaagtgaaccaaggccgttactcaattgaccagcaccgttattaagcttttgtgcaccagctacaccttgtgaagcagcagattgaacttgagttaagcctgaacttaattggttcaaagctgttgctgcacctggaagagccttgtttgaagcttgagctaaagcattaacctgagcctttaaagtttgaagctgagtcatcaagttactttgttgcattgcagccattgagctttgcaagccctgagctgctgaagtagcatttgccattgctgacttcatcttatcagtattagcacctgattgagccttttgaacaacagattcaaccgcttgagtggcagccttagttgctgctgcttgagccgcttgtctttgatcagctggtactgattgcacagctgatgaaacagccaatgaaattgctgattgaatttcagattgatttactgaacttgagccagcattacctgctgcactttgcaattctttcaagctattttcaagatctgcagcttgtttttgaactgtagctaaactattagttaacgatgaagtatcaaccccaccaccaatagcttgattcaactgttgaataccgctattgatttgtggcaaagcagttttaagttgggcaagttgttgcttgtttgaaccactcaattgagttgaaagttgtgaactcaattgttgcaattggttaaccatttgttgggtaccactttgcaaactgttagcaccattcttcaaacgatttgcaccgctaactaagctggttgcaccactttgcaatgcatgagtaccactttctaaacgacctgcaccagtttgtaaacgaacagcgccgctttgcaattggctagcgccactgcgtaaacgatcagcaccactaactagttgacctgaaccactttgcaggcgagttgcaccactttgcaattgactagcaccgttttgcaaacgattagtaccactaactaattggctagcgccactttgaagacgactggtaccgttttgaagttgatcagcaccatcttttaagctgttagcaccgttagcaaccttgtttgagcctttgctcaatttacccaaacctgaacgagcttgatcaacaccgtcgttaaccgtgtttaattgattgttgacataaagcatatcaattggttcgccgtaaggttctgtaacagatgtcgcaaatgaaacatcttttgaagcttgaagttgcttagtcacttgatcaattaacttcaaattttcttcattgtctaatctatgcttgctttgaatgtacaagtatgatggttcagccatccctttagagaagtgcttttgtactatcaacaaaccttgcttagatggaactgaatctgcaatttcatcagtgtcatcgtagttcaagtgacctgagtacattaacatgaatggcacaacaacaactgctaacacaaccaagtaaataattggatgcttcaatgtggcagatgaaataccatgccataacttgtcatcactttcaccagtaaatttcttaactggccagaacatcttcttaccaagcgtagccatgaagaatgggttgagtgttaaaagcactaccaataaaacagcaacgccgaccgcaacaccaacagctgattggtaaacggagaatttagctaaacttaaagcagtaaaaccaattaagatggatgaacctgagtaaagaattgttttaccagcattgcgcaaagcgtcatgcatggctttatacttgtccatcccttttcctagattttctttaaacttgtcatacagcaaaatgttgtagtcggtaccgataccaaagagcacgataaccataaacacttgcgtaaagtttgaaaatgggaaattggcgcttttaactaaattagtaacaattgagaaggaagtaaggaatgaaacaccaactgtcaacaatgaaataagtggaacaattggtgacttaaatacgataaccaaaacaataaagataaagacaactgtaatggcttcagtcttcttaattccttcttgaattgaagcggagaagtcgtgctgcaagacatccgcacccgttacataagtacgaagcccttgcgttttcgcggccttgttcatttcgttataaactttttcaatcgtaccatgactcttagccacattaaattgtgctacccaagtcgtgccatcttttgattgaagtttctttcttgtagcaatattggaatctggaagtaatgaatccttgattccgtacttgcctttatcattagtgaacttatcaagcgtattattaatagcctgtttatcggcattagttagcttgccactctttttgttaaaaacaagtgctactgcataagtgtttttctttttcgagccccaattgttctctattgactgtgccacattgctttgcacattacttggcaacgtaatgttagagtgatcattagtcagctgcgtaatgttaggcaaagcaacaacggaaataatcaatattaaaatccacgcaatcagttcgaaaacatggttcttcagaaatttctgcactttcctatttcctccctatttgttgtaaatcaggtactggttctacaagtcgtaaaatcatttcatgataattacgattagattcatcttctgtttcatctccaaaagacttcgatttatccaaaaaaacgtaccctaatacggcgccaattaaagcatgaaatgaaatgacactttcttttttaaaattaagtctttcacccattttaattaaatccaagatttcttgattgatggccgcatcctttggatattcgttcaaatgatacagaatacttgataaagccggatcgcttaataaaaagtcgcgcacaacatccgcaaacttaagcaatgcatccctacctgacataccaattaaatcattcatcaactcatgacgtaggatcttaatccgtcttgcaccaactagtgatagcaattgtttgcgtccggaaacgtaatgataaagcgactgtgagcggacatcgagcgccttagccaatgctggcaaagttgtagctgtcagtccttttttagaaattaattcagtagcttgatcaattattttatccagatcaagatttcttttctgtgccattttcatccctcctttgtcttagcatagtaaataatatacacctacagtgtgaagattacaatctacatagtgtaaataatttattttttctataaaaaaataatgaagccttctcggacttcatcatttccgttacttatgcttttttataaaccaaccattaaccgttttgcccaatttattaaaattcttgtgttgcgtgctccaaacagacatacagtaagcacgtccgttagtctgtacaattgcgacagcaaaatcatcatcaccaattgcataaatgccgccacttaagccagaaactaaacttggtcgctctttagctagggttgctaaaactcggctagcatattgccgatttaatacccgaccttgatacaagccaatcattgttttagctaaatcattagctgttgtctgaccagtcatatttgagttgaccttagtttgagtggcacccatttttttagcaacttggtcaatattattaactccaatttttctagttaaggcactagttgcagttttgttacctttaagcattgcgctgcgcaaataacttacaccataggtaataccaatttgaaacatcttatcacccttggctttgtcttttttgctaatcttaatcgcagttcgcgaccccatcttgcctttttgttcttgctcatacaaggcgatcagtaaaaataaccgcattgtttttcctgcgtcatgagccttattagtattagaaactacggcaaagtgactagagttagttaaatcctgtgctactacctggaagctatcatcaatgcccataacttttttgatttgcttgactagcttctgattactgcctttttgagctttaacatggttagaatattcaatcgaattaaccttgggttccttaggcttttctaattttttaacctttggttccttggtcttctttttattcttagcgaccttgctgttatttggttcaacaatctttaactgcgcgttttccacccgctttatgtttgatgtatacaaaatgaatgcaaataaagtcacaattaaagaaccaattaatattttatgtttcattaaaacgcctcaattttagaagaaatgatgccttttcatcaaaatgactaaccaaaccattaaaacaaccatcaaaataatgattaaaacccagtcaaatgaattttttaaaattggtagactaacattcatcccataaaaaccggttaaaatagttggaatagttaataccaatgaccacacagttaagaattgcatggtgtcattcaaattattgttcatcatattattactggtagctgataaagtcttagttacctgctgggaaatctgcaccatttctgcagactggcttgattcaatcaggacgtcatccaagcgttcactggcttctttagtgaagtctaatttgctgtgattcaggccatgcaacatgattaaatccgtctgaattgaacttgataaataaactaaacttttttcaatattcgaaagttccaccaaatctttattgttaatgtcatcagacaacttctgatctaggctgttacgttcaacgtcaagttgcgttacagcacgctggaagtattgtgatgaatataggaaaaagagcatcaacaactcagtaacatctttagcttcagacaaacgctcccgcatatgttcatcgttgaattcatcaaacacatagctggttgattctgtatggaaagtaaagatattttcacccactactaaaaaagtgattgggtgtgaggtaaagtgcttaatcgtgttggtcggccaaattggcacatcgtaaacaagcaagtggctcttagtatggacgtcatagtcatagtgaggacgttcgtgacggtcagaaatataagagataatgtcaggcgtaaaattaaaatcctgctgcaatctctcactgtcttcttcacttaaattattgatgtcataccacttatactttgttcttaccggaaaattttgttgtctaatcaaccagctcacctcaacttttattttattacctagtaaatggtaccatttttctcaattctttttccacaaaaaaacagaccttacggtctgctctttgaaatctaattgctatttaattttattgcttccaagcagcatcaaatttttgcttaccagtattaatttggctgttagtattttgacccttttgggctgcagcaaagatattttgcaaaatgctgttcaattggttgtatgcagcatttgaattcttagcaacaggaacactgtacaagttcttcatagcatcttcaagtttagcaggaagcttgatgctcttgttattcttgtattcactagattcgattgcactattgtttacaggaatgtaaccagtagcattagcccacttaatttggcttgacttagatactaagaacttaatgtacttaaatgcagcagctttttgttcagcgctagcgtggttaaacatgtaaatatcagtaccttgttgcatggtgtatttgccaggacgtggagcaacatcataagtaaacttgttacctacaccttgcttaacaaagccttcacctgcagaagtaccaacaaacattgcaaccttttcgttagcaaatggacctgaaaggtagtgttctgaaccagctactctgaagtaacccttcttaataccatctgcatagaagttgagaactttctttgaagttgaaccactgaagttaatcttatcagtaaagttcacgccttcgtccttcataccaagagtgtagtagttggatagtgaatcaaaaccagcacctacaactttgtggttactcttcttgtagatagtttctgaaacatccttaagttcttccatagtagttggaactttcttgatgccatatttcttaaacatggtcttgttgtaagtcaaagtttcaattgacttgttaaatgggataccgtattgagttcccttaatttttgcaccatcaagaagttcagttctaatgtcagatgcctttgcactgccccaaccaacattcttgttgttgatatatggggtcatgtttacaagcatcttgttttgagctgcgttccaaagccaacctggataagcttgagtaatagtaggtaagttatttggtgattgcaaagttgagttgatcttagcttgcaaatcattgtatgcaccttggttttcaagcttaacagtaattttagggttcttcttttcaaattcattagttaattgctttaaagtagaaccttgtactcccggcatagcgttccagaagacaactgtagtcttcttagtaatctttgatggaatcttctctgaacttgatgaagaagaattgccgctctttgaacaagcagcagtgccaactagggccaaagtagcaacggcagccatagtaagtttcttactaaacttcatttggataaatcctcccaaaaaataaaactaaacaacaatatgtttttgatttactaaagcgtgattgtttgaccacgtttaggtaaaatccgttctccatatgggttctcttccagctccggatgcaatgtgtgcaccggtactaaaacagctggttgaaccccagcaatgatttccttgagttctttttcatcggcatggcctgaacagcgcaacgccttatactcaatatcattgttagctaaagcctctacaaatggtttgtaggcaggatcaaaatcccctaatggctcagcatttgagtggatatacaaaccacccttttgcagcttatcataatcggtgacaacttgccacatgtatttatgattatctgctaaaagctcatcatagctaacttctagctctggcttaaggtcagcatagtgctcctcattaagcatgtaatagtaaggatagtcttcatccaaactttccttaatcaaatgggcacgctgagcatgtaaaacgacctttcttggtgaatcggcaatgattcgcaataatcgttcaacattagtaggataagtattaaaagtgatttggcgttcaggattagccttttgcaggcgcacgatttcttcagttagttctacttcattcttagggccagtaaactcttcactgttttcatcatgcttttcttctggccaagaaacaccagtgccttcaataatcagcatatcgctatttttagctgcctgcataaagtcccgcacccaatctggatgataaccatgcaagcgaatgtcgccagtataggcgatttgcttatccggtgtcttaactaatagaccagtagcaccgtaagcgtcatgatcactaggatatatttccaggataatatcgcccaccttaattggtttcttgtattctgccgcgatgattggacgagtataagtccgatcatgacctgcagcaggaagcaagaagtcgcccttttcattcaaggctggcaataaatgagctgtaattggacctgcataaagtggaatttctggggccaaaaagttcattgccttactgtgatccaaatgtaggtgcgaaatataggccgccgcatgctcccagcggtcagtatcaattggcttacccgtcaatttaggatcgtaaaaattaggcacatccccgattaatttatttttaatcagagtttgataactttcatctggcaattttaactctggccgataaacttcccccaagtcaaacaatacatgcgacttgttataggccacttcaatcatcggtccaccaattgtggttaaaccattataaaaagttactgtcgttttatcctttaaggtcattgcgcactactcctcgaataatttgctttctaaagatgaagtacaaaatcaagattggcaaaacagtcaatgtggcagcagcaagttgaagttgagtttcactacctgcatcagatgcaaatgaagttaaaccattgttcaacaatctcatgctgtcttcgttagttaccaataatggccagaggaatgaattccaaccagaaatgaaacttaataaagcaacggtgaacaagccacctttagacattggcaccaaaattttccaaatatattcccaatcactcgctccgtcaatcatcgcagctttataaattgtctgtgagattgaaccgaagtagctttgcaagtagtacatgtagaaaattgaagttaaaaatggcaataccaaaccaatataagtgttcaacaagcccattctggcaatggtattgtagttagtaaagataatcgcttcacctggcaccatcaataacgataaaagtaccatttgaacaacgcctttacccttgaacttcaagttaaccatggcaaaagcaccaagcaaggcgttaaacaaacttacaattgtcgttacactagctgtgataaaagtgtttaggaagtaacgagcaaatggagcttgggcgaatactttggcatagtttgaccattcaaaatgcttaggaatgattgttggtggaatagtggttgtttctctaaaactcattaatccacccaaaatcatgtagatgaatggaaagacagtaatgattgcgaaaatcgctaaaataatataagcaatcaaagtgccccaacgaatcttcttcatcctttactgtccttcaatcttcttcatcatcttgcgttgcaagaatgtgacaaacataatgatgataaataagacaaccgttgcggccatcgctacacctggagtaccaacaatttggaacttgttatagatgtagaacactgcagttgtggctgagttaccaacacctgcttgtccattgaataaggcataaacagatgtataaatcttaaatgcagcaatgatattcattgttaataagaaggcgatcgttggcacaagctgcggcattgtaatacgccagaacttttcagtaccagttgcgccatacatatccgcaattgtgtagtaattagggtcgatgtttctcaaggcccccatcaagataacgatgttaaaagctaaagaagtccacacaccaaagatgataattgtcgtcaatgacatcgctggatcatcaatccagtttggtgttggcaagtgaactgccttgagcaagaagttaagcaaaccatagtcaccgttaaaaatataacggaatacgataccaatagcgatagttgacgtaacatatggcataaagaaagtcgtttcaaagaatgacttatgctttatcctgctgaaaataaaccaggctaacatgattgaaatagccaaagcaactggcacagaaattagggcatacaaaatagtattcttgattgcccgccaaaattctggatcactaaagatatattgataattgctgaagccgctccaattcaaattaattaacgagccgctttgaaaactcattacaaaggcccgcaaaattggataaatactaaagaaagtaacaaagataattgttggcgctaaaaagagccacgcctttttctgattgctcttcattagtagacacgctctccttccttagtaaacaggaatactcgatcaagacgcatcttcaaattgatattatcaccaggcttaattggtgtctcaaggttgactaatgaacgagcttgtaccccatcatgggtaaacttcaaaattcgttcacgaccgattaattcgacatcatcaactttagctgaaactgcaccatcttcttcaactggcaaaatattttctggacgaacggataaaacgtactcgccgtcagttaagtcacgtttaaaacgatccttgtctaaatcgtccacgttaatttcaaaatctgagccagtaatcttgccgccattaacctttacattaaagttatcaatcacaggattaccaacaaaattagcaacaaagtagttatttggttcaagatagaagttttgtcctaagtcatcttgttggatcacaccattattaaagagaataatcttatcaccgattgacaaggcttcttcttgatcgtgagtaacaaacaaggtggtaatacccacacttttaactaaagcacgaatttcttcacgaatcttcaaccgtaaacgtgcatccaagttactcaatggttcatccatcaacagaatcttaggttgttgcactaaagcacgagcaatagctacacgctgctgttgaccaccagataaattgcccggcttttgatcagcaagttcggtaatctgggtcgttgccatatatttttcagcaatcttctttgcctcatccttaggcatcttttgcttgcccacagtcagaggaaacattacattctgaagtacagtcatatgtggatataaagcatagttctggaaaacatagccgatctgacgatccttaggtgctacgttaacaactgacttgccatcaaaaaggatgtcaccgctagttggattaagcaaaccagctagcatatttaagatggttgttttaccacaaccagatgggccaagcaaacatacaaggtcacctttttttatggaaaagctaacatccttgattgcttcatgaccgttatcataaacctttttgaggttctttacttccacgaatttctcatcattcataagtttcacgcaccactatatattgatttaaatttttaaatttctctattaattctaagctaaatatacgaaaataacaaataattttcatttgaaattcggggtttcaacgactttgtgaaatgcttctcagcaagtattcggcttttgttcgcatttacttttatttttcacttatttctttttaaaaattcgggtttactaaatattgtggtaggtaccaaaaaagccatgaattagtcatggctttttgtatcataagttatctccacgttcaaattgatattttgaactattcaaggcttgacgaaccaacttgctcatcaagttcttagtctttttggtaatcacaccagcagtttcatcattagcgctagttaaatatttaataagctctctgccttccatatttttagctttttcatcaataagatcaattcggccaatatcgtagctttgacaatcatcacggtaggcgtttacctcataaatatattggtgatagcgtggttcaacaagcacttgtaaagttttatacaaccagtaagcactactatctggatcaaccatatgatctgccaccttatagttaagtggtgtatcctcaatattggtgtagaaaggaacatatggtgaatatgcataaaagcccatattaatccattgaattgcagccatcttggcaggaacatcatttctaatttgcaagatgcttgattcttggtttctgtctaaagcaatagaacggaacatcttttgttctttttctgaaccagatgaaaaagtgtccattggatcgtatggtgtaccgttatagtgactagttaaaaatctttgcacatcttcaacaccaatcttcttttcgggaacgcgcgtaaatggcatttcttgactagttgggtcttgttcaatgcttggattaaacaacttctgtccataccaagttcttggagtattgtaaaaagcatcagcttcatccttagtaccaaaaatatctctgaaagaaaagctaccgtcagtactattgtttaaatgattcttttctacgaattctcgaataccagctgaatacataaagttatctggatcatcaaagtcaacattttgaatcaccatgatgttaggacaaattgcgtaagaatcatcaggaacacgagccgcaacccattggtgacccgcgccagtttccagataccaaacttccttgttgtctgaaaaggcaataccgttgctttcaccggtaccatatttttcgattaattgccctaagcgcttaacaccttcacgagcagtcttcacgaatggcaaagtaatataaaccattgagtcttcgttgattccatttgctactaaaggatcatgtcctaagcagcgagcattagtagcttcagtttcagtggctgacatggcaacgttatattcgttaatgccttgctcgtcccagcgaccttctgaatcatcagcagtagggacagcagtccatttgcagccatcgccctcaaggtgcatcttaaagccgttatattttgatacataatcttcatcataatgacgggctgggtttaccacaaaaactttttcgttaatgccaccataaccgtcttcgtcacgcgcaatcatggttgatccatcgattgaagcgtccttaccaactagcattgcagtacagttatcttttttcattattgtttgtacttccttttttatttcagtaataatttttcatattattaattctactactcattaacctgcatttgccgatcaacttttgctcgaccgttattatagttaaaaacataaccgggctgcacgttatagagatagacattgaagtttaaactgccatcagttgaaacggcctgcaaattcacgccgcgggccattaactcattaccacgaaaaacagcagttgcttgataaattacacgcttattctgccgcagtgctctcctaaccttagcctcaaaaatagtctgaatcttttggttagaataagcggattgcgtaaacaaattcttaggattattttggtcccctgattgattgcgtggatcataattgccgctttgatcaattccagctgagactgaataggcaatcaagtggccccgattatagatttgggtaccgttacggtgattatagtgccagccagtcggttcaacatattgccttactcgcaagctatcattagccacattgcgcttttccaaaaaggctgtattagagcgcgatgttcgattcaatgaatcaaggttagagtaaatcacccgatttatcttccatgcgcctttgaccaaagtcgacttatcatggttgacttcggtataagcgcgactgccactcttaaaattcaaattagctaatttttgataatcagttggcgatagacctccataattggtcttggcttttgatgcatcgctaattgtattagttacatgttcatcattattgccagtaaagtcacgcaaaaactggctaccatttggatcgctgccagctttagtaaaaactccccataaaatcgcgattaagacaattaatgatgaaacaaccgttccttgtttttttcgtcttcttcgtgtcatctttttcctctaactacgagcccaatcatcaagcatgcttaagaaaaaggtctccgaaaaacgcttaatcttagcaccatttttgatcaaatcacgtgctgcattcaaatcctgattatcttttctaaagaaatcttgatcacccatgattaagtaattagtcgttgctaacactgaattgtcaacttggccgcccatattgttgatcatcttgcccgcttcagcttcgttcatatgaatattgccagacaaaacgatattcttattttgaaccggattgtgccaacctaagtcaacataatccaattcgccagtagttaggtcgatattcttaatcttgctttgtgccttttccaataaatcatcagtaaagtgctgggcaaagtcatcataaaccttgatcgtatcaagagaatcctgcaaaccgtggtgagcctcaacttgagcaattccagcccgctgcatgcagtcaagcagacggttatggcgctcgcgtggataatatgtccgcgccaaacgcaatacgtcaacgtaatcattatcaagcactggtaagccatatttttgacttaaatcatacaaaaagttcaagtcaaaattgacgttatacccaatgataacgtcatcaccaataaactcacgaaattcacgaatagcctgctcagccggaatcccttccttcacaatttgcgcttcagtaattccatttagcttagtaataaaagcaggaacagaattattcttggaaaacttcaccaaattagtatattgatcaacaatttgaccgttacgtaccttaaccccacctaattcagtaattcgatcgcggtaaggatataagcctgttgtttcaatatcaagcattgtataattggtcaaaaagtcaggcttttcctgtccttttttacgcaacttgtcttgcgcaccggttacatgtaaaattccattttttatgtaaatactcattcttcacctatttaattatttaatcaaattcatcagcatctcgtgcgaattgctatcaaaacccattgctcgtttcttaagatcagctggcaaatctgcatcagctaaatcagcggcaatataatgccaattaggaaattgctgcactagctttaccattggatcaagtaattgaggactggtctcatctacgcctaattccaaaattacgacattcttgtcctcggctcccgttagaaaccaacgaaaacgcgtattagcatcggtatcagggaagaagttagcattcagcggcatatgcaattccattggactattgcagtcctcgcactttggtactaaatctgccgttacgttgccgttcttaattgccgtcataaagcgttctactacttcacggttatccttttgaccatgattaatcccgctagaacactgcattttagtccaatcaccaaaggcattgaaaattcgattttcattaaagcctgcattttcaaaaaagtgcccgaatgtactggtcgcaataaaatattttttatcacgaattagcttttttagagcaagcatcgtctcactaggctcatattgtaaggaatattcgttgattagctcactcccaaaagcccattgctcgctccaagtatcaaacctcttatctaatgcatccccaattgtatgcacatcatacttatctgcaattttgccaaattgatcatcaaagccttcttcacttaggatatctagtccctcttctttggccatgccattaccagccgttacgatcaccgtgttagcatttttcagccatttttttgctgtcactaaatctgccattttatctctttccctttgaataacctgtcaagcgtaattgtccattaatgtattctcctaagaaaacatcactgatactattataacctgcctcttcaacttgttgctgtaaccaagcttcgcttttgtgaatcaactctaagacatcaatattagcctgaccatcactaattattgggaaacgaatgttagcttcatcattttcaataatagttaattgcccgttttgctcaaagatacaattcttaatcttttcaacagagtagatacctcgactgcgcaatttaaacattaattcattagcggagattcctgctttcatgcagtttcccactaacaccttgccatttttaattacttgaacaggtttaccatcgataatccctctaatccaattattgtgatcacggctgaatttcaaaataaaaacaaccaacgtccaaacaattagaactaggaaaaactgaagaattgtaatactaggattgtaaatcaagccaccaataattccacctaaaacataattctgcaactgatctaatgcagtcgtaggagccagattagacttaccaaagacattgatttgaatgattaaagttaagataccgagagcaaacttaatgaataattgtgtgtaatctagctgcattattttattacctctactttatgatcaattacatgggcttgcgttaatgtgtaagtattgcgatcatcattaaggtttaactgataatcaatatttttagaatcaatccttacgatcatgccattagttaaaaccgttgaactaactaaaacatcagaagtcgaaacattttcatctttagcaatcgatttgatgaatggcacgatttgaatcgcctgtgatttttgcgtattaagttgcacatatttttcatattgcgtaccggcaaacaaaagcaaaaataataaggcaataatacccaaatcgcgatacttggttgcaaaacggttatgtaaatatagcaaagcaaaaattatcattgctaacgccgagactgtcaagaagtttgtgtaaataatctctctcgttgattgacttttttatttatcttttaatcaaaataggattctagggtgtctcgaacttgcccaaatcctttatgaatcctgttaaagtaacggtcattgtaatccattgcctgaactccaataaaggtgtcaagcgacggctcagttggaaattctgttttaggcttggttttccgcttaagcctgttgttaaaggattcaatcatgttagttgagtaaattgaagctctaatagctggcggatagttgtaaaaggttaacagatcaggctcaacctgtctaagatctctaactacgtttttgtaggctttttcccagttttgatagaattcatgcagcacctgtacagccatttctttgtttgactgagtatgaatctgcttgaattcatccagtgctttttttcgatcgtcaacccgcattttggcactgatattacgcatgacgtgtaccaagcagcgttgaaaatgcgctttaggataggactggcagatagcctctttcatgccaactactccgtcagacaagaagagctctacctgttcaaggccgcgactcttgaagcctttgagcatttcgctccaaatctcaatattttcagtaggcgcaatacagtagtcaatcacttctttatgaccattaggtttgataccgatggcgatataaactgcttcgcgctcatgagtgacccgcttaagaggaatataggtggcatcgagataaacgcagaagaacttatctgacagatgtcgctgatgatatgcctcaactttgggaatcatttctttagaaatattggaaaccatagctggagaataatagccgccatacattttctcaatcaaatcagcgatttctcgggttgtgacgcccttggaatagagcttgataacagtttgctctaaaacatcagtatgccttttataatctggcatagtgtgttgatgaaactcaacgtttctgtctctaggaactttgatttctatttgtccgaattgcgtatcaaccttgcggtaataagcaccatttctagaatttccggtattccagccatcgcgctcataaggattgtagcctaaaaaggcagtcaattcggattcaagcaggtcattgacagcctgttggagcttttgtctaaataaatcattaattttatcctgattgaatagagcattagccatatctttggtaaaatcattcatgaaggaatctcttttctagtatgtttttcgttcaaatcaatcatacgggaaaaggattcctttttctaatattcaggaaaataaaattaaggaaatattcatccttacacaaactattttacagtctcctaacgccgccaccaacatcaaagcatataatactgcctgattagtattctggttattttgaatatatttcattgtataaaaggtcatgctctacctcacccttcatatttttctttcattctaacacagaaaaaaagtagcactttcgtactacttttactagaaattattcacttttcactattattaattatttttgaatttcttttaatccagctttgcgacggcccatgttaaaccatggtgaaacagtgaaggctaacacatcattaattacatagatcaatgaattaattgccatggctaagtttgcatcaccttgagcataagttacgcccaaaagaatcaactggaagacgccactagcagtccaccaaaagtattgattgttgtaacgcataaagcacatgatcccagcagttaatgaaatagcaaaactaatagcatcaatccaaggacgaggatcattggtaaatttaccaatcaaaaagccggatacaacataaacaagtaaagtaccaacaatagcaacaagccattcctttgaaccgaattttcttaagtgattcttagtgtcatcattccatgatctaacagcaataataactggtaaatctaaagttgcaatataagcaatctgttcaaaaatggaaagataattcttagctgaccaacctgcatagataaaacaagcagctgaaatcaaccccaaccaaccattaattgctttagtagcgttaattgccaatacacaaagtgtacccaaaagcgtaccaataaaagtaatcaaagttacgcttgtaattttgccttgaatcagcaaagctaattgaaatccaaacgcaaaaaaccataaacagtaattttgaactggccagcctttcaattgattaaatagccaaacaaaataattttcgtgttttctttccattgtactgagacgtaaaaagtagacaattaaaatattggattaatagaggcttgacttcgatactctttcggggttaagccttttaatctgctctttatcctttcgttgttatagtattcgatatattcctcgattgcttgagttaattcttgaagattatgatacttgtattcttgatcatagaacatttcagttttgagcaggccaaagaagttctccattagcccatcatccatggagttgccctttctggacatgctttgagtaataccatggagttttaaagctcgctgataacgagggctttgatactgacagccctgatcagtatgaaaaatgcagttattaagagctgtttctttggcaaaagccttgtcaagcattgtcattactaaatccatatctggatgtttggagatagtataagaaactatatcgccaccgcagccgtctagaataggcgataaataaagcttttcattattaagatgaaattcagtgatatcagtataccattttgtgttaggcagggctgcgaagaaatcacgatgaattaaatttggagctattttgccaatagtacctttatagcttgaatatttgcgcttattgcgcctgatgcctttaagacctaatttatgcatccaatagcgaacggttttctccgtaactttccagccctctctgattaactgcaaagctactctgcgatatccatagcggccttgatgatgattaaaaatctcatggattctagcaataagctttgaccgtttaggcttgacgggctgtcgtttgataatcttgtagtatgagcttctggcaattataggtagctcagggtgctctgcaatcgcagctaatacataatttaaactaactttgaattcttgccttagatccgtaatcaccctagctatttcttctgatcttcttggtccaaggcacttagtttttttacgtattcgttcacaatacgcaatcgcaagttttcttctttcagctgctggatctctttctccagttccttgcgagatttctgcttttctttggtcacgggcagggcgtcctttctgtttgataatgacattatacccgtttttcttatattctctaatccaattgttaagcatgccaatacttttaaaccccagttccaaagacagctgtaagtatggtttattgccaaagattgcttgttcaatagttcgctgcttaaactctttggaatagctttggtttttagtagttaaaatttctattccatgcatatcaattaatctaagcatatagtctaaattagctagattcattctgtacgctttagccaattgactgattgagatattttcatctttccatttatgataaatttctattttttgttctttattaaatttagacatagtaaaagacctaaaagtgtctaacttttaggtctcagttcacatcctattcaacattccccttttttattttaggttgcaaaatacaagatcttgtgccttatccgtgctatgtaaaaaaaacatcgatatctagtatagtggaccattaattaaatacaagaattgacatttttaatttttgcgttaataacatatttctatttccgtttatcaagcaaacatttattaattttttctaaacagcaaaaaaattttgttccttttagtgacacagtgtcatatgatatatacgtgattattaatttatatttttatggaggtacactcatgtttaaaactaagaaaacgcaatttgctatccgaaaattagcacaaggcgcctcagcagttttactttgcttcggcatattgggcggagcaagtgcacctatcgttccagctgcaactacagatgacccaacaaaaacagtcactgaaagtacaattaatagtgagaatacttctttcaatattgaaaccaccaccaatgcatctgataaattcgcttccatcagcaaaaatggggggggtacaacggtagtgccaaattctgctgagccagtttctccggatcagtccattacagaaaatgataatcagcaagaaaaaactactgtagagaattctactgagatatctgagcctgtcaaagacatcaataagtttgataatgatgccaatgttgataaagacgaaacaatcactgtaaaaaagccaacaattaatgtcgacactgaaaaggtagaacaaggcgatgaaacagagaaaagtaaactcgaagaaattaaaaagtatattgaggacgtagccgcaaaacatccattaggcattgccggaattttccacctttttggtaacgaaatagatggatctgctcatattgcaggaaatgtcgcaacagacaaattaagtgctggcaacttcggtactatccaagatgccactagtaacttgactacttgtgatattcattacatcggcagtattgatcatttgaatcagattgatggcgaaaataaactagttatttttggtccagatgttgaatataaatcatacgaaaatggtagttccattcaggtaaaaataaatggaaattggcaaaaagtaggaattccatacaacaaaactatcagagctgaccaaattctagatattcaaggcgaactagataaattaagcgataaatcagacgaatgggctaagcaaacgcaaaccgaaggcgtaattgctgatttcaaggagggtaaatagttggatcgacgtttctaatgctatcaaggatggcagcaaagatcctatttatgtaactattgatgcaaaatacctttcaggcaataacaagcatgaaattgctattaaaggcatccctgcagacgcagaaacaccaatcatcatcctaaatgtaactaatgttcaaaatggcgatttaaccgttagcacaagacttgttttggattattcagaccaaactagcatcaatggcgtaagtgaaaaaccatctcaacttaataagttattatggaattttggaacagatgttaaaaatttaactattgaaggagacttccatttaggtagtattttagctactaacgcacatattaccgctaacaaaaatgttgacggtaatatcattggtaacaaaatcactattaaaggtgaaactcaccgttgggacctaactccgccattagtagaagttgaaactccgccggaggatccaaaagatccacctaaagaccccgaaaagccagagaatccacctaaggatcctgaacctactcctgagcctgaaccggaactaaagcctgagcctactcctgatcctgaagaagagagtactcccccattaccagaagaagtaattcctccaactgataatgaaaattcctctgacttcaaggaagaggacactgctcctctaccagaatctgttgtagaaaaacaagttaaaaagaatcttccatccccttcaactactgaagaaaatattgcacctcatgctgcgactatcccaacctcaactataactgaaaaagaaacagttttacctcaaaccggtgaaagccaagacaagctaatgacgattggactcatcactactagcgttgcttcattgtttgcagtattaggcacagtaatcaaaaaaagaaattaattaaaaatgattcaattcaagccatttttattcttaaaataatctagaattaagtgaggattaaaccatgttaaaaaatagactaaaaatattccaacaaattcttcctactaaggcaactaacactccaaaataccaattgcctatcaactattacgatcctgaaggcagcatggttggcacttattctggaattaacttggcggcaaatgaaactatcactcaccaccagctcaaaagatttatcaacatccatcttcccgaaaactacgaagtttttccttactttgcttatcctaaggagaatatcacctgtgaaaatctgcctgatgaaataatgatcacaatcagattatctaattaaaaaaggcgactcgattgagtcgcttttttcattgcaattgatattaatgttgcgaagcaccagttgtagtatctggttcttcgtgcttttcttctttaacttctgcagccttagttgaagcaccagttgcggcgtctggatcagaatttctacggtaagttgcaccagtagttgcatcatcatctactaccaatttttgaccagtagtctcacagaagtacttaactaatggatataagtctttgacccattcataaataccagcatagttaccttggtcgtcttctacacgcttataatagtccacaaccaacttcttcaaattgcctgttggtattggcatataaacatcatcatgacctgcttccttagtccgcaaagcatgaacaacttttttaacattcggaataacgtcacgaacatctgggtgaactgcgcgcatcgtatcacccacttgatctggcgtagctagcattttcttgttaggatcagttggacggttataccacaagaattggttattatcatcaacaaatgtcattttaccaatggtatttctcagcatccaattaagttggttaacagttaacagacctgcatcaagtttgacataatcgtcaccctccgcagcatgaacttttttagctgctttatctagccaatcaggatcatttttatcgattccctcaactgtatacttagacttaccctttgcatcgaaatcttcttttaagtattcatcggcattcatatctttaagccattttggttcagccatagtaagaccccctcgtatgaactttgttaatctaattatataatgtaagtggtttcaattcaacaattttaatatattttatataatatttttactagctggattatatattattttacgcgtggtgctagttaaatctttctagacaataagccaaattataagctaaaattgcaatttccaaccggctttgaaagcctatcagactacgtgctcgattgttctcggcattgtaataggtcagaagcgaaaagtcgctttcaattgttctgcgaatagccatcaattgatgatcattgtgctttttagctcctgtcatatttttacgatatggtgtccaaagttcataacccatttgttttagctgttgatgcagttctttgcctaaatagccttcgtcgccaagaagatagtaattagatggatgggcattttccagcagttcaactgtctccttggcatcatgaactgatgcttttgttacgacataatcaagaatgtaaccgtcatcgctaacaatggcatgaactttgaaaccatagaagtaaattttcttggtggccttataaccaatgttggcataaccgcgaaaaattttagcacgatagttgcgaattggttggcaaacaggtaccggaaagctgtcaatgatcaagaactgtccattcaggtcaacctttttattcatttcttgccgtatctgataaatcaattgcaatagctgacgtgaacgccgattaaaacgtgagtgtgataaacaattgaaacattcacagaatcttctttgtgattcaattcctgtcttagcttgccagataagtaaagccaaaatcagactgtccgtagttttaatttgatcaatatttcgccgatgagtaaactcagccggtgcatacaaacgataccagtgccgacaaattatcactaaatctttaaaactaacttgtaaatggtggctaaaacgcttaagcttaaggcagttcaatcagatcagactcttttctattattactatttacaagtcgagtctaacaagattggacttttttattaactaaaacgatttaactagcaccctgcgtattattttatataaaaaaagctgatcaacgagcaactctttacatctttgtctcaattgtatgagtgtccaaatgaatgatcacgtcaaacatcgctttttcttctggtgaaatcttatgagccacctcaataacagcaatacgtggattcttcaacagcgtcttatgaatgcctaacgacaagttcgggtcaagcgcacttgtcgcttcatcagccagcaaaatcggccgatctgataaaagcgcgcgagcaatttctactctttgaatttgtccacccgacaagccactgccgttttcacctacagccttgtctagaccctgttcctttaccaattcatctagaccagcctcatgaataacttctttcaaatgctcgtcactcactttacgtcctaacgtaatgttgaaacgcaacgtatcatcaaacatgaatggcttttggttaacataggaaaaataattatgggcagcatcccaatttcccgttacatccgtaccattgatcaaaattttaccgtctttgggctttctcaaacctaatagcaagcgaagcaaggtggtcttgccccaaccacttggcgccatcaatagaactttttcacccggcttaactgttaagttcacattctcaaagatgcgtttgtgatcactacctgtaacataagataattgttcaacctccataccatcaaaatgatcgatcttctgcttatcatctttcagcacgtgatgcaaagcgcgctgggtcttttcccacattggcacagtcgacttgacttggttaaattcgttaaaaagagtcacgattggcgtgataaagttcaaggccaaatcgaccatcattactaatgtacccacctttaaatttccctgcagcatcataataccgccaatagtacatggtacgatgaagcaaaacaattcagcagctgaataaattaattctagtgcccaagcttgagtcaacgtcatattacgcagagcgttctccattgcctgggccgcaccagctgctcgtgtaacgatgttggtgcgcacgttataaagcttggtagcctgtgccccatttaatgaatcggacacattttgcgtatagttagcgttagtcgttgcccaaatcttggacttacgtgtaatgataggactagtaatcatttgaactaatgctggcgcaagcgtagcaatcaaaaatactagggtcatctgccatgaactataaaaagcaaaagtaattgccccgaaaaacgacaaaccttggaaaatcatatccaattgtgccgttatccgattagtttcaatctgttttaaatcgttggtcatcagtgataaaccgctcttgatatcaggctcaccttgatcaaccaaataacgcaagttagtgcgcttaaaggtcatattcacgtcacgaataatgcccatctttaccgtttcatagacaaagttactggccataaaacacatctgacctaaggcagtcaaagcagccaggcgaatcaaatgcagataatcatgcgatcctgacgaagcaacattcaacataatttgtaccatataagctacaaagacgatgttgcaggccttgattgcggccaaaatggtatagctaataatttggctttttttagcgtacttcaggctcattaatttctccttttctatcccgttagaaacattatacccgctagcttgtctttttctcaattagatacgataattagagtaatcattttaatttttaatgaaaagcagaaaggaacttttaatgaagactggtactaaaattattactttagacaacggttatcacttatggaccaacacccaaggtgaaggcgacattcatcttctagctttgcatggtggtcctggcggcaatcacgaatattgggaagacactgcagaacaattgaaaaagcaaggcttgaacgtgcaagttactatgtacgatcaactcggttcactttattcagatcagcctgactactctgatcctgaaattgccaagaaatatttaacctacgaatatttcttagatgaggttgacgaagtccgtgaaaagttaggacttgataacatttatttaatcggccaaagctggggtggcctattagttcaagaatacgccgttaaatatggtcaacacttgaaaggtgcaattatctcctcaatggttgatgaaatcgatgagtacgttgcttcagttaacagaagacgccaagaggttttaccacaaaccgaaatcgacttcatgcacgaatgcgaaaagaacaacgactatgataatcaacgctatcaagatgacgtacaaattttaaacattaatttcgttgaccgaaagcaaccatctaagctttaccacttaaaagacattggtggaaccgctgtttacaatgctttccaaggcgacaatgaattcgtaattactggtaaattaaaagactggcatttcagagatcaattacacaagatcaaggtgccaaccctattaacctttggtgaaaacgaaactatgccaatttcaactgctaagattatgcaaaagaagatccctaactcacgcttagtaactacacctgacggtggtcaccaccacatggttgacaaccctgacgtatattataagcacttagctgactttattcgtgaagtagaaaatggtacatttaagggcgaaaattaattaacagatattcaggctggaatcgatttccggctttttatttttaaggaaaatgatatggatgaaaaagatgtcaaaattctgctagttgaggatgaagaaagcgtcgctagcttcgtcaaaactgaattagaatttgaggattaccaagttgtttgggctgaagacggcaaaaaagcattagacctttttactcaagaaaagccaactttaattttgcttgattggatgttgccagtatatgatggcatgaccgtgttacggcgaatccgcaagcaaagtgatgtccctattattatgcttaccgccaaaaattctgcctctgatataagctctgctcttgatcagggactagacgactacctcaccaaaccatttgaaatcgaggaattgctggcacgaattcgggtagtcttgcgaagactggaaaaaatgcggcagcaaaatgacgtccctgatacttccctagaatttggcccattaaaaattgatctgcttaagcacgaattttactgtgacaccgagcaaatttatcttactcctaaggaatttgccttaatcactgaactaatgcgggaccccgaaaaagtcaaaagtcgtgacgagttgcttgatacagtctggggatatgactttgttggtcaaaccaatactgttgatgtttatattcgaactattcgcaacaagataggcaatccctacaaaaagatcattaaaaccatgcgcggcttgggctattgtttgagaaaattagatgataatcatgaaaaaagctgatcctcaaacaactacgcaacaattaacccgtttattcgttaggctatttgtcgctattttaattctggtcaatttggcttttctaattatttcatcggcctatatttattaccaagctgaacggcaaagtgaacaagttgttgaagcagtaaaagaaaatcttgattcaaaatatgactggtcggctatgctggatgcttatttggcaaaacaagacgatgatgccatcattttaaccacccctcaaggcaaaagttattactctgaaaatgctcacgagacctttaaacaaattaatcgccaaaatcattatcaaaacatggtctattccaataagcatatttacttcttacggacggaaaactcgcatgactttaaaatcaaggttgcattaaacattgatcgcttatttcatttaattatttggctatttgggacaatgattgtcatcaacttaatcgctattctgctgagcatcccccttattcgccgttttgcccacaaatggagtcgtccaattcaggtaatgaataatgaaattcaagaaatccagcaaggtgcttcaactgagcaaatcacagtgccgcaacaaccattagagattcgaaaattagcccagtcttttaacaatctgctagcttttcaaaaacaggccttacagcgtgagcaacaattcgtcagtgatgcttcacatgaactcaaaacaccaatcgccgcaattcgaggacacgttaatttaatcagacgccatggtcaagccaaaccagaaatcatccctaagtcactggattatatcgatactgaatcaaaaaagatggaaatattagtcaacgatttactcaccttaggaagaatcgaacgcaatactgaagtcgtcaaaattgatttggtaagaattattaatgaagtagtgtcagaaatacagtcagtttatccacaaaaaatacagactgacatgccacaagtattgaaatatcgtattaattcactagattttcacaacattgtgcacaacttagtggaaaatgcggcaaaatattctcctcaagacagcactattgtagttaaattagctaaaaataaaggacaggtctctttcacagttgcagacaacggaatgggcattgcgccagaaaatcgcgagaagatctttcaacgttttttccgtgaagacacgtcccactccaataaagttaaaggatctggcctagggttagcaattgtcaaagctgaagctgataagtatcatggtcaaattaaagttacggataatagtcctcagggaacaatttttacagtttcttttcctacagaaaaatgaagaaatcttcatttaaactctattaaatcttagttttttaaagctgcttagctagtaagataaatatatcaagttaaagcaaaacaaaaaattatcaatagtttaaaggagaacatattatgaagactattaacttaaagaaaattactattactggcgtagcattactcggcttaggaactgctgcaattaccgcaactaatttagctactgaacctaacgtggttcaagctgcttcaagcaaaattaaggtttcacaaaattcagctgttaaaaagtttaaggcaaaattcaaggcagctaaagtcgaatcaatcagcttagataaagaaaaaggccgttacgtttacgagatcgaaggcttcaattcaacgagagaatacgaaatgaaaattaatgccgcaactggcaaagttatctcatcccactccgaaagacttgatcgagacgagcgtaataaaaaagcattaaatctcagcaaaactatttctcgctcaactgctactaaaattgctcaaaaaagagtatctggcaaggcagttgaatggtcattagatcgtgaaggttcaaagaatgtttgggaagttaccatcagcaagaacggccaaaagagcgaagtaaaaattaacgcaattactaaaaaagtaatcagtgttgaacgggactaattgagaaaagaaggtatagaatagatgaaatttactaaactgacaagtattgcattattaagcgcagctttattaacaggaactgtagcatgttcaaaacaagataattcaactgctaaaactactacccaaaagagtgttacttcatcaaaggttacacataattctgaatcagcaatgagcaaacaaactcaaaaagataatattcaaatcaaattaagccagcaagaagccattgataaattccatcaacaatttagtggcaaacagcttaaaagcattgaattaaatcgtgaaggcaaacattacctttatgaaattgaaggattcgattcaaacaatgaatattctgttaacatcaacgcagaaactggtcaaattggacatgttcattcagaaaagttagatcatgatgatcgaaaccaaaaagctctagatttcaagggcaccattagccgcgacgatgctagtcgtatcgcagaagagcacattaaaggcactagcgaagaatggaaactagagcaagacgaagacactggtaaaacatactgggaagttaaggttaaaaatggtcatcaagaaaccgaagttaaaattaacgctcacaccaaagaagttatttcaactgaacatgatgattaataagattaagaacataaagaaagccgcaacattattctcgaagttgcggctttttattttgtctaatttttggataacttttttaccaataaccaatcagtttgaggatcgctaccaacttggaaagtatgctggctcactttttcaaatccatgacgcttataaaaatattgtgccggaatgttcttttcataaacgcctaaccacatgtaatctttgccttcttctcgtgctgtcttttctgcaaaatcaaacaaaacattgcccaacccgcgatgttgaaaattagtacgcagataaattcgttccacttctagagcattatcacgtaactgctcagtctgagcatccccaacattgatttttaaataaccagcaatttttcctttaaccattaaaaagtaaaaacgactattaggattttcaatctctctaatcaacttttccgtctgataatcttcctctaaaaagcgtttcatgtcatctggtgcagtataaggatcaaaagtcgttttaaaagtttcacgtgaaactttctgtaattctttcacatccgctgttgtaattgctttaatctcgtacttcatcaatatttcctctttccaccgttcttaaccaggtgccaattttcactggcattcttttctacaatttgtaacaaagcagctaattctgttctctgtttttgatctagtcctgtcaaaactatttcatttgaataagcattttctttttctattcgagcagctaatttatctcctaattctgtcacaaacaaatgcttaatctttttattctgctggtcattttctttcctaatcagctgattttgttccagttttttaatgctacgagctgccgtcgtccgatcaacattaagcatccctgctagatggtcagaaataattcccggattttctttaatgcgggctaaatacaggtactgacctcgattcaattgcatctctttaaattcaatattagcaatcgaatcaagtgctcgcgcaatagtgccaatttgacgcaaaatatcttctttcatgtttttcacctaaaaactattatatttaattttgttgtaattgcaacaataaaatataaaaactaaaaaagggatcgctccctttagttaattcatcaatttttctttagttcatttagatcgactacctgatcagctaactgcttaacttcatctcttaagtggtgagttaccataattacggttttatctttttgcgtcaaaatcaatctttctaattgtacgctagaagctttgtctaaggcagaagtagcttcatctaacagataaattggtgtatcacgcagcaatgcacgtgcaaaagcaacacgctgtttttgcccaccggacaactgtttaccttggtcagctaaaacagtatccatgccatcaggcaacttagcaattagatcctctaatccacattctttgatcacttcagaaatttttgcttttgaaacttggcgtcccaaagttaaattccaccctagagaagcagtaaaaatatatggatcttgctgcaaatatgtaatctgatcatgcaaatccttatctgaaatctggttatattccacatcagaaatttcaattttcccctgataatctctaagtaagccagaaatcaaattcagcagagtcccccatcagaatatatttatttttcagtttaaaatttaaattcaaattctcaaagataggcttatcttgtccagaatactgataagaaactttatccaattctagattgcttagtttaaaatcagcaggcaaagctccatcaacagttttaagcggtatagtcttaaatttttctataattggtttaactgatttgaattcttgccaattaaaactaatcccacttaattcagcgaaaattgtactggcaaaaaattgtgccccactgatggtcccgactggcgttaattgatgcaaaatcaaccagcctgtttgccctaaaatgataacttgactgataaaggctagaccattggtaatcgcctgagttatcccggctgttttactataatttagcgcatgttttttaacatcatcagaagcgccattgatctttttgacgattgtttgcggtaaattggcaagaaataaggtattgaagccattcaacacatcattaattgaattaaccaaacgttcattggcatgggtatattctaatgaccttttggccaaaattttagaaaacaaattgggaaccactcccataataattgtcaaaataatcacagtgaccacaagactgacattgaagtacgccaaagtgagcataccgaaaacaatttcactgatttgtctaatgatcatcatgaaatcctcgacaccaaagttattaatggttgtaatgtcattggtcagccaagaattgtaagtagctaccgtttgttgatgaaagcctgaataactcgtctgtgatagatcttgcgcaatgtcatttctaattaatttatccacattttgtgccaaacgggtttgctcaacattgactagacagttaacaatcgcgtaaaaaatataggcaccgcccattaaggcaacccacatgaaaaaacgctcagcttttaattttgcaactgcacttaaagcattagcgctagatattccggctagtgtcaaaaagcctgcattaatgactattaaaaatgtaacaaataaaaattcccactttaatcttttaaaatattgcagtaattccattgattctccttatattaaaaataattaaattaataatactatatttatgtatttgttcaatattttttaatactttacttaaattactgcaaaattaaaagggatcgctcccttttaattagtctacataagcatatttatatgaccattgcgtaccagcagtattatgaatgatgccgtgaactcgcttgttttgcaagtaagctgtggtctgttgataaatcggtgtaatagcctgattactatttacaatcttagctgccgaaatcagatcattccagcgtatgtcaggattattggcgtcttgattgccagcttttttaaccaaattatcgtactcagaatttgaccacttaccgtaattgtaagacgtacctgtcattggaatttgcataaatgtcatcgggtcgttgaagtcgccaccccaatgagagagataaatgtcaaagttgccttgatgtgctcgactggtggttgacttatcaggaatattggtaatatttatcttgattcccttcaattctttggtccattgtgactgcaaatattgggtcaattgatcactgtctgcttcatcatttgaagataaaacatcaaaagtcaaactcttttggccaatctcctgtaatcccttttgccaatatttcttggctagagctggattataatcaactgtatttttcactgcttgttctttagcaaaatctatacctgttttaggatttgcagccaaatcattggcaacaaagccttttggcagagttgagccattgcctaaaacctttttagtcacaatatcacgatcaattgataatgataaagccaagcgaatatttttattattcaaggcctttctattaactgcatttttatccttaaaattataaagcaagaaacgcactaacgaatatggatattgagtaaagtcattattgctcttcaagtttttaacttgctcacttgaaagtggagttaaatccaatttgccctgttgatacaactgataaccagtattgttagacttaactacttgatagtgaatcttgttcaacttgactaccttcttgtcccagtaatcattattcttaacaaatgaccaggtatcattagttccattccatcctttaatcttgaaaggacctgagtagacttggtactgagccttggttgcgtatctattgccatactttttcacaactttttcgttttgcggcccaaatagtggataagccatcaatactctaaagtaagcgatcgggcgatttaacttaaccactactgtctttttatccggtgcagaaatccctaatgcattaggtgacttctttcctgcaatgatcgcatcagcattcttcacgccactaaaaagataggcatacggagaagcggtcttaggattcaagcttcttctccaagaataaacaaagtcctgcgcaacaattggatcgccattggaccacttagaatcacgtatcttaaacgtccaggtcttaccatctttagatacggtcccagttttagctaagccggctgttggcttaccatttttaccaagacgataaaaactttcgaatacattgccagtttgaccaaatccggtagacttactgatatcaatagtatctagtggagctgtggtgcttaaatttaaagtgccactttgagctgccgacttactactgctattgccattaccacatgctgcaagaagcatccctaatgaaatagtaacgactcctgctaaaactccctttagtttcgacataatttttcctttctcaaacaaaaaaatgggatgtactccaacacggaatacatcccattaagaaccacaactttttaactagttaatcagtaatagtcttaagatgaatcaccacatcagagcatgtcaaataaatgctgtttgtacaacaacattcagtgtattgacattgcatttgatgcttaaacatgtgattcatcctccttcttactttttataagaacaatcataagttattcgatcacgattgtcaacaaaaatctattgtataattatagaaaaaatatttggaggaatttttgtggaacttataaaatatggtccttacactcttttcacacttattggaacagtcttaacatttatcgtggctattgagcatatcggtatctgtttcttagaaatatttggtaaacctgaacaacaagctaaggcttttgacatggatatcaattttggtcaactaccccagaataaattctggggcttggtggctggctcgttagcttgcgctaaccagaacaccaacttgcttagatacggacttgacttaccaacaataatcttttgactattgccgatagaggtcgtctaattaccaaagccttttgagtccgcgagttgctagcggactgcagcctagcttaggctgctttttttattttagaattctgccagttgcctaagcctttttctaagatgtttactgccgcattccaatcacggatatgatgcgtttgacagattggacaagtccattctcgatccttaagcgttaatttcttataaccgttttgtcccataatactgccacattgatggcatctttgggtggtgtacttaggatcaattgttttgaactctttgccatataggtctgccttatatgccagcatgttcagaaaactgcgccagccaacatcagaaatagcttgagacaaggcatgattctttaacaggttcttgcttcttaattcctcggcaactactaaatcgtggtttttgattagtgcagttgagagtacttgcaagaagtcatttcgctgtctgcgaatcttatcgtgcagtttagcgactgctagacgctgtttttgataattcttggctaagcgcaaattgcgtccctctttcttagctctgcgctgcctgcgagacaagacacgttgggcatgggcaagcttctttttggttttgcgataaaatcgtggattagccaccattgctccgttagatgctgttaagaaattatcaagattgaggtcgatgccaatttgactctgcgtcttaggcaattccttaacaaaggcaatatcgctgcctagttgcattgataagtaaaactggtcgtcagcggtctttttaatcgtgactgtgccaattctagttgggatatgattaagaaaacgctctttaatcaattttctaaagctggcaatgcggacaacgcctagcttaggcaatttaacgtgcttagcatcaataaatctagctgtcccgttatcaagaaaggcttctgtctgtttaggatactgacagttggtctgatatgaccaatcactacgttttttgtgaaaagtcggaattccatgaccaagcttgcgatagttgttccaagctttctgatagttttgaatcgcattggcaatagcgagactgtcaatttctttaacgcgtaaaaagctataagcatcgcgaatgttctttggcttagccaataactcattattggcgactacttcttctgctagcttagtctcataattattaagaacagaaaaggcaaaaggcattacttgatattgtctaacagctaagtagcccttagcccgataattgttccgattacgtcctacataagagttgtagacaaaacgctgagcatcataatttagcttgatgattttcttttgtttagaactaggataaaagcgtactttcaagccaaaatggtaggctaaactgctcattctcttcatgtgtttcacctccttctgtagattagatatttatattttacaggaaagtcgaacatatgtcttcattttttaataaaaaaagctgaccattaggtcagcttggccctatccatccccgcattaaaatacggggatttccgggcgtttttcattaaatcgatcacacttagtttaagtaaagatatctatgtttatgacatagtgggctatgatgaccgtaaagactgcactattcaagttgacgcaactaataacaagattctaggtcagtctacgcaggtgcttgattatgactacgaaaaagatgcgtctttgaacctaaaaaagacaatttcacgccaagaagctaatgaaattgccctaaaagaattcagtggaggaacaacgatttcatgggaattaactgatgacaatgatcaatcaatttggaaagttaaaatgatccacggtgaacacaaacataccgtaaaaattaatgctagaacaaaggctgtaatctaaaagaagttctcattatcaatgaagatgtgaggatttcttttaacatttccaagtcattgccaccatcgccaaaatattggtgtaatgaatatatcttttcttgttttcgaattaaggcaccattttctgcaacgtagatgacatcgggatatttagtaatgcacatgttttgaacagaaactttagacaaaaataatccccaacttatgcacaagttgaggattattttttatcttttatctaggttgactatctgcacgtgacttgtaatcaccgttttcagtaccaataattagcttttcgccattcttgataaaatcaggaacttgcacaactaagccagtttccatagtagcaggtttaccaccaccagctacagttgcacccttaatctctggttgtgtttccttaacggtcatttcaacagttgatggcaattcaataccgataatcttgttatcatctgtaaagtccatatcaaccataatgttaggcatcaagaacttaacgtcatcacccaattgatcagctgaaacttcatattgatcataagtatcagtatccatgaaagtataagtatcaccttcgccgtaaaggtattgagcctttttcttagttacttcaactaaatccactttttcagttggacgcatggtcttgtggacaactgcaccactcttaacgtcacgcaaatccatttgcataacggtattacccttacctggcttatggtggttagcctttaaaactttgatcaatttgccatcttggctaaaaatcataccttttttcaaattaattgcttgtaccattatttcttctccctttaatttaaacttacctttcgactagtttaaacacgctggaggcaaagcaaatttttttatcaacagtaaataaatcgtattcataatacctagtataccaaattagatgtgccgcaggtatatccgatcaatcaaatgtccgtcagtcttatgcaaaatcaggctagcacgttccttggttggcgcaatatattcacgcaagttgaccagattaaccatctgccaggtttcttcagccaattgaattgcatcttccagcggtccattagccattttatagtaaaaattatctggcttatttttatttaatttaagtacttttctaaagcgttgcatgtaccatttttcaatcaaatcttcttcagcgtcaatataaattgaaaaatcgaaaaagtcactagtcacaacttgtccattctcgggcaattgcaatgtattaattccttcaataatcaatacatcaggattttttacatgaccatatttaccaggtactatatcgcttaattcttgagaatacaacggataaacaatatcgcttttgccactcaagacatcacgcaaaaagttgctaagtaaagccatatcatagctttctggaaaacctttgcggggcattaaattgcgccgttttaattcctcattagggtaaataaaaccatccgtggtcatcaagtgtacctttaattctggataggttctactgagcaacaattgtaataaacgcgcagtggttgatttgccaaccgcaaccgaacccgaaataccgatgataaacggagctggtgaaaaacttttatgcaaaaatttgatttgtgctttttgcgcattctttttttgttggtaaactaagtgtaagtaactgatcaaactggtatagatctcatgcacgtcggttaggtcaatcacgtctcctaaagacttgatatcagctaattcttctttggtaatattgactttatctaagggagctaatttagcccattcatttctgttaaaactcgtataatttctcatatatcgtatccatattccttctaaaacactaacttattataatagaaagcgctaaaaatatgaaaaaaataatcctattcggcgattccatttttaacggatatcgtaatggtcaaaatacaaacctagtaactaatttatttcaacaggcactaattaattatgcacaggtggaaaacatttctaaaagcggtgctaccacagttgaaggcgtcgattatttggagcaaattcccccagaacatgatctagttgttgttgaatacggcaataacgatgccgcaacagcttggggcattagtccagaaagctacgaaaagaacttggctcaaatccttagtgcagtaggcaaagccattgttgtgggattgtgcaatcccaatccagaaagtgacatttttcaatattatggtgctgaaagactcgatctttttaacaatatcgcccaaaaagtcgcaaaggcacatggtgcacaatttgtggatattttacctgcaatgagaaacttaaaagacaaatcgacatattatcaagccgacgggcaacatttaactgatcaaggaaatgagtttttagttaatcaaatcgtgccagtaatcaaaaaagacttagcctaagccaagtccctcttcatcatcacatgttctacgccgccttcatcaaacggttcgcctacaacttgatagcccaagctatcatagaaaggctttacccgcatttgggcgtgacagtaaactgcatcaatcttattttgccgtaaaaatttatgcacagctgtaatcattttcgaccctagctgttgtccgcgcgcttcttttgacacagcaacgcgtcctagcatccatttaccatcttcttgaaacagacgacaagtcgctaaggcagtcgtctgtttttgattgagtaaataaacctgaacagcaattaggtcctcatcatctaaatctggtaaagttatcttctgctcagctacaaaagtcgtgttgcgcaatctttctacgcaatagaattctctagctgtcatttcatcaatctttttaaaagtaaaatcatctatcttcatattacttgcctaaccaactattgtttctgccaaaccatttttcattaagtttacgcaattgaccatttttttgcaattttgctaaaccttgattgaccttctgacgcaaagttttgtctcccttacgcatccccacagcgaacaagtccattggcacgcgatcattctgaattaccttgtattcgctacttttagccatgtgagcaatataatagtcggcataaacttcatctaacagaattccttgaattcgtcctgcattcagatccaagaacgaattagaaatcgtatcatataaaactgttttcttagcatgcagcacatcttgtttagtttcataccactgctctgctgttgaaccagtttgcattcctaattcataattcttcatttgtttaaatgaactaatgtcactatcttttttcacaactaaaacctggcgattacgtaaatatggcttgctaaaagctacttttttctgtcgttctggcgtaatgctgtaaccattccagagtaagtctatcgtaccgttacgcagctctgtaacgttcattgaccaatcaatcgtttgaaaagaaaccttaatgccatattgtttaaagactgccttagctaagtcgatgtcataacccgtcaattggccgtttttcttttcaaagcccattggtacaaaactatcgtctaagccaattaccacttgctttttgctggcaatcttattccatgtatcttgagtattagcttctttttgtacgctttggcaaccagttaaacataatgttaaggccaagacgatacctaaaatccattttttcattgcctaatcctcgcttaacggtcgaaccttgagcatctgatccgccacattctctgcaaaattcaagtcgtgggtgataatcagctgggttaaacccgatttttttaagcttaaaatcattttctcaacttccttacgtaaatttggatctagcgcgctagttggctcatcataacaaagaatccgcggtttcatagccaaagctctagcgatagctactcgctgtttctgcccacctgataactcataaggatactgctgttcacggccacttatttgtagacgttttaacaatacacgcgcatcctgctctgcttcagttttactcttttttaataccaaagtaggtgccaaagtgatattttgtaaaacgctcaaattaggaaaaagattataatcttggaaaacaacgccaaccttgcctgaatcataaggtttaccgtcaatcaaaatttcaccagaatcttttgtttccaaaccggcaataattcttagtaaggtggttttccccgctcctgatggacctacaattgtcataatttctccgtctttcaaggtaaaagagatgtcacgcaaaattcggtgaccgttaaattctttgctcaaattttttacttctaacatattctcacctcaactacttgtaataagaaaagtatttttccagctttttcaaaacaaaagcacaaatactgatcaacagtagataaattacacctactaaaactaacggtactagcgttacgtctctggccattgccacattgccggccctaagcaaatcacctaaaccaatgacataaactagcgatgaatcctttaccaagttaattacttcatttccaattgaaggcaaaacaatttttattacctggggaataataatcttggtcatcgtttgccagcggctcaagcgcaaaactttcgctgcttcaaactggccttcatcaatcgattggaagccgccacgaaaaatttccgcaaaataagccgcataattcaaaacaaaagcaaacaaggctgcttgatagcggggaaagacgatatgaataattggtaagccataaaagacaaagatcaattgcaataataagggcgtgccccgcataatccaaacataaaagttaaccaaccagcgtaatggtttaaacttacttttttcacctaatgagaccaaaattcctaatggcgttgctaaaattaacgtccagaaaaaaatacttaacgtcatgcctgctcctgacaaaagagcgggtaaaatttctgcaatatattttaatgacatactctcaccttcatttttctttcctaataaaaaagccctcttaggattaacctaagaggacgactgctcgtgattccacctcatgttcgcacctgctcacgcagaaatgcctcactaggttgatcattttaaaagaaaaaccctcatagccaaacggctacgagggcgaatgtaatcgcggttccacctcatgtttacaaattgctcacgcaacttgcctcaataagttcaataatcaacctttagctataacgggctatcccggattttcctacttttgttcagaagaccaactcacagatgtgattcatactagcaaatatcttatttccaccagcaaagactctctattactttgactagtattactatttctgttctaagttgtttttaatgttgaataaatcttaaatgatctagcaacttttgtcaattatttttcttcataagtatctggatcaacatcaagcaatggactcttttctccagtataaataatatctagcttatacattgcacgagaggtaatagtataaacaagttgagtttcatccaatttatggtaagcagctttagaggcatcccacatgactaccgcatcaaattctagtcccttagccaagtaagaaggcacaactagagtaccatcaactagtcgctgattagcagtcgcaattaaggtcgtgttttcaccttttttagctaattcttcatgcacaaatttagctgcagctaagtctttggtaataacagctgtcgtacgcttattttgttcattattatgcaaaacgttaactaaaacatcaattgcttcatcatcgttttttctgccccaaattataggcttaggacctttacggttaaaggcttcaatcttttcgccttgacgcaaaatttgcttggtgaaattggtcaattccttagttgaacgatatgatttcgttaattgcaccacatcagttttttcaggatcaaataagccagagatctgcttaagtaagctacgactttcatccttagtaaaaatagcctgattcaagtcacccaacattgtaaacttggcccgtgggaaattatacttcaagtaagctaattgaaatggagtataatcttgaatttcgtcaatgaaggcataacgcatctcaaagtcagtcctgcgaccagtgatcatgtcatacaaatataagtaagctgaaacatcattcatggcaatatggtgctgcttaaagttattcttaacttcttccacatgagccaaccaatcattttcatcaatattccacttagatagatcaaccatcttaggtacagctcgcaaaaagctcaggtattgtgctcgcatattcaaaaagtggttgtgcaaaatacgcttatgcacgcccttcaaggctgataatacaatttttctacctaaaaaggcctcttccttagcctcagactcaaattcttgatcaggtcgatcatataactcatttaattcagattggctcattccttcaatagcgtgtgccacccaagccttcttagtttctggcgtaatctttcgattcaacatcttgatcaattcttcacgcgttgcatcaattcggttggccaacttgtaattttcattgaaagaataatagatctccttaattttttccttatcaaagtaaggtttcttcttatcacggaaataaatattcttaaaaataacaccgcgcttattcaagtgctctgcataacgagtcaacaagttaaagaaattaactgaatccttaaacttagaaatattgctgtctgcggtttgatcttcaaactgtctgaataagttttcaacttccatacctggcaaccgtcgcgcaacaaactgccagtaagtcatttgaaccatattttgttcgcccatttcaggcaaaacattcttaatatagtcattaaacaactggttaggactgaacatgattacatcacttgaagtcaggttgccacgataacgataaagcaaaaaggctatccgctgcaaaatcgcactggttttaccagaacctgccgcaccctggacaaaaagcagatctgctttggtgtttcgaataatcttattttgttcgcgttgaatcgtcgttacgattgacttcatctgcgttgatgatttttctgacaaaacttccaagagcatttgatcaccgattgactcatcagtgtcaaacatgttcacaatcttgccatcttcaatcataaattggcgtttcttagtcatatcaactgtaatttcaccttcaggcgaattgtaagaaactttacccaatttaccatcataataaattgaagatattggtgcccgccagtcatagatcaagaagtgatcgtccttgtctgcaaaagaacctagaccaatataaatcgtctctgttaggtcctcatttttttctttaaaatcaacccgagcaaaatatggtcgcttctctaaacgctctacagtctctagctgcttagctgaatgttgccaagcatgttcacgttcactcaataattgttgctgctggtggattgacagtgctgtttccattgaagtggaataaccatcataatccaatttaacatcgtcaaaaaagtgtgaattaagctctcttgcttcgccttcagctgatttgatagatttttttaaagttttttcgcggtccttgatctgacccataatattatcaaggtgcttttgttcaagttctttttcgtttttttcagttttggctgtagccatctaatcaccttttctttaaaaattcgcatactattttaccatgaatagcgctttcataatagttttcctgctcgtgagaaaaatataaataaaaattgatgaaaactttaactttagagactataatcttgacatattggggtgatatatacatgaaaagattttttaaattactgagaaatgttctcttgcttgctcttatcgctcttggcgtttggacttatcagaacaatcccaatattcgtatcgcaacgcaagactccctagctacacttagctatcgaattaacgaacttctaactaacgaaacgaccatttctcccaataacgaaaaaaagactactaatatcaaaactgacacagataaaacagaaaatgacaattcttcagacaatcgtgtatggtcaaatcctgaagctaaggtttatatcgatattagcaataatgctcaactaagatcagctgcagtcaatgcaatgaacgcttggaatcgtaccggtgctttcacttttcaccaaataaatgataaaaaagacgctcaaatcgtcattaatacagtcgataatagctacaccaatgccgcaggagaaacagcaactacctataaccctgctacgggacatttgttaaaggccacggtcaacttgaaccgttactatttgcaaaacgaatggtatggttacagttacaatcgaatcgttaatactgctgaacacgaattaggccacgcaattggcttaaaccacactaataatgtctcagtcatgtacccaaagggttcgatctatacgattcaaccgcaagatattaaaactgttaaaaagatctaccacgaaaataattaactttaaaagctcacctcttttttctacaataaaaggtgagctttttacgaggagaaaaatatgaaaagaatttatatcgtccgtcacggtcaaacttatatcaatcgctacaataagatgcaaggttggtgtgacacaccattaactacaccaggaattgaaggcgctgaagaagctggtaaagctttaagcgaagtaccttttgacattgcattgtctagtgatcttaagagagcaagtgatacctgtgagatcatcatgaaatataacgccaacaaagacgaattgcagcacatcgctagtccatttttcagagaacaattctacggctacttcgaaggaatggattccgaaatggcttggcgaatgattggtggcagtcacggctacggaacacggcaagaaatgtttgctcatgagagcatcgatactattaaggattggattaaagaagccgatccttatcaccaagcagaaaacgctgaagaatattgggctcgtcttgatgatggttttaaattaatcagtcaattggatggcgctgaaaacattctgctagttactcacggcttcactattagaagtctctggtatcgttatggtgaccatattcctttggttccaggtcctaagaatgcttcaatcactattatgacaatgagtgaaaaaggcgaaattaagatacctaagtggaatttaatgcatttatagcaaaataagattaggcgaatcgggcctaatcttattttgtttaattatttttgcaaaacaatatttttatatagcttcactgttattaaaaaacttcctactatttttaacagtaggaagtcttactctaactaatctttagtcacttgttttagtttttattaacttgcagtcgcccaaagtctgaatcaattgtttgccatctttttggtggaaaacagcgttttgatacgacaatcgttctttctttttactcttatctttatactttttaataaaggttacttcatagttaatccgactataattacgcttacctggtaaaacagagagcaccttgatctttacacttaatttcttgatactcttctttttatgccattcctttagttgcttagcaatcttcttatagtctgcattttcttttccattttcaaagtcatctgcatttggcgacttaagggtgttgtacaatagcttagctgcatcccccaccttaatcaagccaggccaaatcgggttaacaatatagtcaccttctgcatcctgatagacatctttttcgccattgccttgatattcagcagtaccatcataatcagtgacgtcatcctcactattagaaaattctgaactaatcgattgcgacaaatccgttaccctttcggacttaatagtttgaccatctgccttactcttaatatagatttccattcgcttagcaatcggataatccttgaaagtatagctaccatgctggttcaatttacccgccttacgatcattgatatagatcgtaccattaggaacgctgcgcacttggaaagtggccgttttgatcttcatatcaacagtcttatctgaccaaatgttaacaatcgaatcagcatctaaatggcgaccattaaccttagatttaactaatatatgatagcgaccaggaaagaccatacctaaatcttgatagtaattctgattgccaccttccatttcaccataatccttttggttaaccgtcaaagttgaattagcgtgattggtcttcacctgtgggcgatatacttgtatccacaacttatattttggaaaaagcaaaaaattgcgtccatcttgaatcagtctgatttcaccatgatcgcgattatgacgcaaattataggctaaacgtttagctgcactgtgatgctctttaaagtaattttgaagcggcttcagcgatttatctgtcacatccatatcaggcgttgaagccgtgacatactgagccagctcagttttaggatcctgcattttagctacaatgcggtcaatttgacgttctttagtgtaataaaaattgccaattagccatgcaataccaattaacaggataataactcccgatatccaaattttcttatgttttttcattgatcaaaacaccttttcacaaatccttttaacttagattaacaagttgatcaaaaaaagcaaacatcttttgttcacaaatcaagacgaagttcttattatatttagtagcattattttattttggaggggattgcacagtggaagtaaattttgattttgtaaaaaatagcagcttcaaggaagcctttcctaccgctgaaaaaatccacaaattatacacaattgatgattatcgtgacgttatttcaaattcacgtcttctattagagagtctaatcaaaaaaatttttaagttagaaaatctcagtccatattacacagttcatgatggcgaacaccgtaatttgcgtaataatacacattatttacgcaatgaactagattaccctctttcgatcatggatttatttgacgaaatacgccacattggcaacgctgctgtccacgataaccaaattgaaccagatcaaaagcaagcctggcactgtatttgtgatttacacgatattcttgtctttttaattaacagctatgacggtcaagacctatattatttgcgtcccgatattgcgatggaagcacaaactgatgaagaccattattatgtgcgccaaaataagcaaccaaaaataatgaaattgcatgatcatcaaaatactaagaaaaaacagtccgcatctgcaccaaaaaaggcgaaacatgttaaacatttttccagtaaacagcatatagagcaaactaactctgcgtcacaaacgaaaactactccttctactaaagacaattggttaagaaaaattaaagaactctttcaccatgattagttatattgacactatgtcacaatatgataaactatatattatataatttacataccgagaagcgcctatgacgctgccgatacgcaaatgaaaactgaacaagtttctcaaatggggaacggcttatgctagtaggtcgttttccattatttttttacgaaaggagtggttagtccgctatggataatcacaggcaaaaaccttgggctgtcgaacagtctgaggtattaacaaatacaaaaacaaccgaaactggtttaactgaagacgaagttcgaatacgccagcaagctggtttaaacgagctcgcagctaaacctcctaaaacagtaatccaaatggtcaaagagcagatttttgatccaatgatcggtatcttattagtagctgccctcttatctgctatgtttggcgaatataccgaagccattattatcgcgacaatcgtggttcttaataccattattggagtagttcaggaaaaaaaggcacagtcttctttagctgcgttacgtgacatatctgcgccaactgcccatgtaattcgtaatggcaaagaattaatcataccggccaaggaattagtagttggtgatattgttaccttgcatgatggggacatggttccagccgatttgcgcttaattgaaacagctaacttgaaaattcaagaagcatcccttactggtgaatcagtaccggtagaaaaagacgcagctgctgttttaaatccagattgtgctcttggtgaccgcatcaatatggctttttcttcctcaattgtgacttatggtcgtggtcaaggcgtcgtgacagcaattgggatgcaaacagaaatgggtgccattgctggcatgttagaagatccaactgaagtacaaacaccattgaaacgcaaattagctaaagctggcatggtcttaacgactatcggcttaattatttgtagtttggtctttgcaattggtgctttctatggccgtccacttttaccacaattcttggttgctatctcattggcaatttcaattattccagaaggtctgccagcaaccgcaacaattgttatggccttaggcgttaaacgcatggttaagcgtaacgctttgatcaaaaagctgccagcagtcgaaaccttaggtaacgccactgtcatctgttccgacaaaactggtactttaaccttaaacaaaatgactgttacacaggcagcaacgaatgacttcagccaaagtcacgtagttgaccagcttgcagcaaacaaaaccaatcaaactttggcctatgctagcgctctttgtaacgatgccagcttgaacggtgaaaaagagattggtgatccaactgaggtagccttaattccttttgcccaaaagcttggctttaaccaatctaacttaaagaaagaattcccccgtttgttcgaacaaccctttgattcggacagaaaacggatgacaacattgcacaaaattgacggtcaattaacggtcttcactaagggtgcaacggacgaaatgttgccgttatgtacacacattatgactgacaatggcgtgcgtaaaattacaccccaagacaaaaagcaaattgcccacttgtctcaccaaatgcaagctgacgctttacgagtactaggctttgctaccaaaatagtggataacttacctgaagcaaatgctgatttggaaaataatttgacttttatcgggattgtcggcatgattgacccaccacgaaaagaagttgcagcatcagttaaaacctgccgtgaagccggtattcgcacaattatgattaccggtgatcacaaggtaactgccttggcaattgcgaaaaagttaaacatttatcagccaggtgacttagcaatctcgggaactgaattagaccaaatgtctgatgcagaattagatcaagctgttgaaaaggctaccgtttttgctcgcgtttctcctgctgacaaactgcgcatcattcaaagcttaaagcgaaatggtgaagtaacagctatgaccggtgacggagtaaacgattcacctgccttaaaggctgccgatatcggtgtcgctatgggtgtaacgggtacagacgtggctaaggacgtggctgatatgattttgcttgatgatagttttaccacaattgcgcacgctatcaaggaaggtcgccgcgtttaccgcaatatccaaaaagtaattcagttcttgctagtcggcaacattgctgaaattaccactttgtttgcggcaactatttttaactgggatgcgccattattggcagtacacatcttgtgggttaacttagctacagctactctacctgcccttgctcttggcgtagacccagcaagtaaaaacattatgaaacacaagccagttaaagctggtactttattcgaaaaagacctagttattcgggttattacccaaggaatatttgttgccctgcttactttaactggttacttcattggtaaagaaatcggcaatcaagttgtcgggcaaaccatggccttcagtattttagcattggcccaaatgattcgttcatttaatcagcattcaaatactgatcccatctggaaaagatcagctggcaataatccatggttaacagtgtcattcattatctctgcatttttcatgggtattattctctttgtcccagcaatgcaagatgcatttcacattaccagtttgtcagctggacaatggttaatcgtaattgccctagctttactttcaattgcacaagttgagttagtaaaaggttgggcaaagtttagaaatatttttattaatgacaataatttaattgaagattaattagttacaaaaagacggtagcattacaacgctatcgtcttttttgatattaaactttggctgctgccaattggtcaacatctatctgactacgaccaatctgaattgccttttcggtactttcattcaagctagcattgatcatcttatgactaagctccagcaccattggcaaattaacaccgctaactacccgtattcgctcaggatacatatcttcatattccgaagcgactaagtggggtgtcccattttttaaatcagttagcaccaaaatctgactattttgatatttattcatgactttagcaaaacgagccttaaaatctctgattcctgtgtcgtttaattcaattgtcaggatctgatcattcttgcctaccaacatatcatgtgcagacattagccccgcagccaacccttcatgagttgcaattaaaagttccataaaacgcacctctttgtaagcgatttctatagaaccattttaacatatttttgtattaattaagctgttcaatatctgctaataagctactttgttcaggtgttagccgctcatccttttgccgtaacttaagtacttgtagacaagtgtgcaaaatcttttttccttgttccgtcacttgtttgccatccatatcaggcgttacactggctaaaaagtcatccatctcatcagcagtaaccttgaaaacatcattttctccatgaatcaagggcatccgattgagcatttcttcaatcatttgtaatttatttctagcttcttcaaaatctatcttgttcacatccaattctttttcttttattatacaaaaaaacagccacctaagtgactgtcatctttatttcgtattaataattgcgtttgaaattgtagttgcattagattcgatcagttgatgtgaattattaataaaaagggaagccccaattcctatagcagcaaatacaagccaaactttctgtaaaactgtactcttcatgttcccagctccttatatttcttattatataaaaagccgatcgttatggggatggctacgcttacaattaacataattgtaatattatttacctttacttaagagttacttctccagcaacatttgtatcaaaaaagtcagcaatttgatggacgtccatcccttgccctaaagcccacattaatttggtaatcgcactctcagaagtcatatcacaagcagaaatagctccttccagtaaagcctcacgccccacctcatatttggtcaaatcgctacgttcatacaagcattgactgctggctacaacgggaataccttgacgaattagcttaccaattgcggctaccatgttgcggcgaataaagttcatcccgcctagaccatatgcttcaataacaattccacggcaaccactattaaccatcgcaaaaagcagattaggatcaaagcctggaaatagtttcaccaacgatacgtgtgaattaattttggtattcaaggttggctgaccgtcatgttctctttgaaaatgttctgaattaaaaactaatccatcggaagaaacggttgctactggtggcacattcacactttcaaaagcatcaaagttggtagtccgcacctttacactgcggcagcccagcataactttattatgaaaggctaaataaacatcaggtggacaagttgctgcagctgcaaaagccaaccgtaggttatcgtgagcgtcacttaggaccacgttaattggtacctgacttcccgtcagcacaaccgggatattaatatttttcagcataaacgacaacattgatgccgtataagccatagtatcagtaccgtgtgaaacaacaattccatcgtaatcattgcggtatttgtagatattttctgcaataaatttccattcttctggttggatattagaagaatctaattgcaaaatatcgcggacttgaatgtcgtacggcaactttcccaacattttaattaactcttcaccggtttccttgggtactaggcctgcatcagaagcaacggaagcaatagttcccccagttgatagcaataatattttcttcatcttgttcccctttatctcaaatcacaatgtcgaccataactattcatgattagatcaattaaaacataggccgaactaaaagttaccgcattttgcttactaaattgaaatggcgtagttttgaagaaaaagctatagtcgctaagagaggctaattttcccgtttgccagctagtcagtgacaccaatttcagttcagtattcacgacatcaatcttcttaagttcttcaataattgttttattaaaaccaccaaatgaaataacaaacagcatgtcattttcccgtgcagaccgccctaataatgccacttcgtcgcgtgcactaggcaaaataattgcttttttaccaattaagaaaaagttatgcgccaaatattccgcgataatttgctgctgccagccagtagagtaaagatagatcgtttccgcttgatctaaatccgcaaaaaatggttgtaagtttaatcccttaaaatatttaaaagtttcagcaatgatcttttgtaaatccgtattgaaatctagcgtttgcttgttcttaacgttttgctcctttcgtgtagctaactcggacaattcaaatttcaattcgctgaaaccacttaatcccaattttttgcttaggcgaaaaatagcggacttagaaacgtataatttctgagctaattccagcaaactcaactgacttgctacttcaggatatttcaataaatagctaacgatcgctttatcggtctcattaaaactttcctttttcttcatgaccgctgtttctaaatccattctgtttcctttctcatcactgtttcttattaagaaaagaatatcatgtcgtactcaaaaaaggtagccaccctatttgagtaactaccttaatttttattcttgaattgaagttatgttatgacaattaattatttaagttctggccagtatggagcattaactggaatcatgtcatccaaaatcttcttagcaacggaagcatctggtacagtcttgtttaatgcaaatgcttgcagcatcttattgtatgaatgttcaacataagcatcaacaaccaatttttcacaagtttgttgttccatcatcaagcctctttggaagcgacctgctttacccgtagccattggttgaatgccatcagcaccaaacaatgctggtacttcaacaattgaatctggatccatattagaaattgcaccgttattagcacagttagctaagaacttttcatgagtgttaaatgcgatcgcatgacaaatatctacgatatattcagagtgcaaacctgaaatatcccaaatattattcttagcagttcccacctttacgattctttcacattcgccaaagacaatcttttgccggtgttcacgaatttcatcagtacgagtatgcttcggatcagcattagcaacttcatattgtgggaagtagtagtattgcatgtaattgtttggcaaagtttctggctctagcttatattcatcggcaactttcttaaaggtggcttcccaagaagcttcagtatccttgtcgtaatcgccacctacccaatagccgtgctctttgacatattccttcaacttaggcattaagtcttcgccagtcttcttgttgcgaacttctttccaccagccaaaatgattcaaaccataatagttaaagtcaatatcatgccaactgtccaaaccacaaatggcagccattctgtccatatcatcaatcggcatatcacaaatgttaattaccttagcatttggacgaagacgacggcaagcttctgcaacgattgcaattgtgttggagtagttgatcatccaagcatttggtgagtattcttccatccaatcaataatttgcaaaattgcgggaattgagcgaagaccataggccattcctccgggtccagtagtttcttgaccattcacgccatattttaatggaatcttttcatccaagcttctcatgtgatatttaccaacacgaattgatcccataacaaaatctacatcagtaaaggcctctttaggatcagttgtgtaagaaaacttaatttgaggtgctctttccttcatgataatttcaacagctttggcaatcttttcttgccgttcagcatcgttatcatagaacttcaactgtcttaatgggaatttatcctgactcttgattaaatcaaggacaaatcctggagtaaaagtactaccaccgccagcaataactactgaatatttcttaccatccataatctattttctcctttaaataaaactaagtttttatctctgtttcatttgccttacgcatatatttatatcatcttctcccacaaatgtattcgttttcaccagcttcagactttgtttcaagttttggaacgcgtttcactacgcgaaatatttttaaattttgccttaagcctaacaaatcaggtgtttaacttgcctttattagtaatagtgtaaaaatgaaaaaaataatcgtttcatgaccaagataaactataatttgaacattcctttaaccacaaaaataaatagtccgtatttgatgatcgtatagttttaattacaaaatacgactcaaactagtttcacttccatattttgtagtgtaattttgaaattaattataattttaatatctttctgctattttctatacaatataatatttttaaaacatatctttgctaaacgctgattttatcccaactcttagtcattagtacttgataatttacagataacttaggttataattatatatttttttatataaatttagcctttatcaaaaaactttcgaattatttattaaccgtatagtttttattttaggtcgccctaagtcttgataaactagtactctaaaaaaataacatccatgttttttatttaacacgatacgttattaaagcttttcatgtatagactttgtttttaataatgttagtatcattccatgaagagacatataacgagctttaaggaattgactactccttaagcaaaaaaatgacttataaattggaaatccttttcgtaatataaggggattaagaaaaatgacaaagaatgttaagctattatcacttatcggtatcgcagccgctttagcaggtggaagtgttgctatttcaaataataacaactctactgttcaagctgcttctatcacattacctgctggttacaccaagagtgccattattaaatggaaccaaactggtaaagcaagtaaggctttgattgatgcttctaaaaaaggcatgaaggaaaacaccaatagtgatgcgggttcagataatacgttagttaacgtgactaaattaactgcgtctcaacaaaaagaactgagccaatacactttaagcttaattaattctgcacgtcatcaacttggcaagcaaggctggacttacaaacgaggtgctttgcactttgcaaatcgtgtagctaacgaatactacagccataacagatcttgctgggatgccgaccactatgttactggaattgaacgcgcagctaaggcttctggccttaactcaaaagtaggtcaagtctacgaagatgaagctggcttacctatctcttcaacatacaatactaacttacgtccaatgtcagtattgaaaaaccaaatttactttaacgtaaagcaaatgctttttggcggttttgcaggctctgacagtcagatgaatgactcatctagatacactgaatgggaacacgctggtgatttacttggttgccgtactaagagctacgatgctaagactaaatactttggtattagtttcagtggcttaaagggtgaccaaagcaaggttagtgttcacatgatgggtgttgctaaatgttacatccaaaactacagaaaattcaatcattaaaactaacgctgtagttaaaaacttaatacagtttcctaatccaagagctcaagtagttcagtcaactatttgagctcttttatttttgcccatttttcatcaaaatcctgtcaaaaaaatgcagatattcacacattttcaattaagctatctaattgtttgtatacattagctaatactaatagtgtgttaagttattatcttattactattttgtctataatccttgataaatcaatgtttccagcaataactgtacataattaacaacagtacagcaaattatgattacaattaataaactttttcaaaagcatttttacgttatccatgcgggattttcgcttacacaatctattacattattgttatctaaaaaaaggattgctatattaaatagtaactggtatattctatatcaatatgttcaatgaacataaaaaagggaggataaagatgtatttcactactacaagaagaaaaactaggaaagacaggatacatatccaattctttgcacaagtcttaaaaaaagacctatcacaaggaactgtttacaagtattcagttcaaagattctgtgaagctgcaaatatctgtcgcggaactttttaccgcaactttaaaaatttgaatgatctatttagtcaagtactgcaattcgaaatcaattcttgcttcaacaatccccaatcaagtactttacataaaaaagcacacaacttactgatagaaattgaaactaatgccacctactatcgaaatgtacattctcttgcctcaagtcaaattcgaacacaagttgaccaagctctttttcgtgaaatgcaaaaattgctattcaatagtaatctttctaataagcatatccaaagcatttccagtttgattcttattcgaattctagactggattgctcatgactatcaggacaatgtcatcacagtttatactgacgttgaatgcctttttctccatcacattaaaaaaagttgctagcaacgaatactagcaactttttacattaagcataaattttacgttttaaaataccgacataaggtaaattacgatataagccgttatagtcaagaccataccctactaaaaatgcatctggagcttgaaaaccatagtaatcagcatggaagtcaactactctagttgtcggcttatcgagcatcgctactacttcaacactagcagcaccgcggtccttcatcacttcacttaaagcttgaagcgtacgacctgtatcaataatatcttccataaaaattaccggttgatctttaacatcagattttatatcttgagtgatctttaccttgcctgttgattcggtaccggcataacttgaagccttaattggatcaactgtcaatttaaagttaagtcgcttgatcatgtcactagcaaaaatcattgccccatttaaaacgggaatgacaatcggctgcttgccctcatatttttgattcaattcagcagccatctcatccatgcgcttatctaattgtgcttgatcaaacaaaattttctcaatgtcgttattcattatctgtctaccctttgaattcataattttaccaatgatccgattctagcatgattttgaattgatttaaagctttttagtgcttaaattgcataatttgttcatttattgtctatatggactataaattgttcgggtttagtggaagatagtgttttagtaattgaatatcacttttttggataaacataaaaacagcattctttcagccaatgctttaggaatactgcttttatcttaaatcttcttaatcatatggtcataagtacgatcgccaatcgtcatcgatttttcaatttcataacccttatgcttgtataaagcttgcgcacgtggattttctttgtccacatttaagctgataatatgatagccatgagctaacgctacttgttctgcctcgtccatcagacgactagcaatgtgttcaccccaatggtcgggatgtacagctaacgcatcaatataccactcgtgtggccaagcttcttgatcatcaaaaatcacggttgaaatgagtaaaccagcatttgcatagttatggcgcaagacaacatcgataatcttctggtccttataaggatacatatctaaaattccggtcaccttaccatgatcttcagctacccaaattcggcggtatgaatagcgataatcctcggaaatgaaccctaatttcattaagctatagaattgatcttctggcaaagattcaatcgacttcatctgcatttcatcaaaaatttgctttaagatgggatatacaaaaggaaaatctgtttttcttgctcttctaatcatttttctccctcaaaaattactcatcgtcatgatcattatcaaacaaatcaacatcatcaactacgtcaaacttaattggatgttctggctgatgcttcaacatgtcaagcaaggtagttgccttaggttccaataatttgctgtcatgcattaaacgatacagtgcaaagacctgtgcatatgtagcccgaatcagcaaaccatcaacctgataagcggcatcattatcgtctactaccattgatgtagtcaaaaagtcgcgcatctttctctctgcataatcgtcacccatcatttcctttagtgctggatccatgtcggcgtatgtatgtgacagcttagtaactcgttcaaaattgtaagccaaatcaacattaatccgttcaagactgtcctggtctaactggccttgattcttgcggatttcattagctaaatcatcgattgcttcaccaaatgcaccaaaaacataatcaagtgtcaactgggtctccaactgctctggttccatatcgactaattgtgctgcattctgtgcattccaggcaaaagatgggctcaaaactcgtcctggtgtctggaacaaaattcctgtcaatccttgcttagcagaatattgaacgttaattgaaccaggctcaaaatcacaacgtttggttaaatttcctgcggcagactgaatcttagggtatagttttgctacaattcctgaggtgtcgccttgatcactgtcgatgacgattgaaccgttttgccaggtatcatgcggattattttcatccaaaacagagaaattcgggtcaggagtaaaaccggcatcaatgtcttgattaggtacataaatcagggaatgacctaagaaattagtgattacatttgcatcttgatcgtcactgattgagtcaatataagccatcaagctgtaaagatagccatagcctaacttgttgataatctcaattaattgatccttatcttcgttgtcgctagcttgaacgtagctattcagcttttgccgcaaatcatctagcgtccgttcattggtgttagacaagtagccatcgacgtcagggatgctgtaagaaaagccgaaaactaagcgatacaagtaatccagatcggcacaataagcgtcccaatcatcatcactaatctgacctgccgtatcttgcaaatcgcgggcaaaattaaggataaacgaaatggctaaatgagccgcacattgctctacactctcattttcaatcattgttgcaatcttagtacctagaatatcatttcgaaaaatcatcacatcattaggcgactgcaaatacacaatcaaatcgtgctgctcttcgtcatattccacgccaaaagaatctgcagggatgagattattttgcaccaatgcttcactagcctgacggaatttagcagccaatttttcagcctctggtcgttcaatcggatcgcctattagattgctatcttcattgttacccacggcttgatcagccttatccggcgcattttttaatagagaaaaatcaggatctggcttgaacagatacgaatcattcgggatctccattaccatatgatagaccacgcgaccagctgcttcgtcatcatcagttgaacgttgcacttccttaggaatcgccaataaataagcgtcaggcatttgggctaattgagtttcagtctgggctaaaatatctgccccatatagaccactagctgctaaaatgctctgcaaattttctcgcacatcggccgtggacattttatccgtgtcacggtaatagctgttaatttcggcatttttttgcgtcaatctataccaagcgttgtatagataatccatatcctgacgtagctgcttaggatcaagatccacacgctcttcaggcttcgttgcgtccataaaactgccagccaagctaacgataatcccctcaccgttagaagcatcatcttgttcaagaatgtagccataagtctgatcattcaagagcaggctaggaatagtcaagttgttaggtgtctgtaagtaaatcaaaacactgtcatcatcaggattaagttcggcgctcaatgaattagggacaatgctgccgaggctgtaaatccaaccgattgcactgtcgattttgttaattacttgttttagttttgcatcttcagtcatggaaaaactccttcattattatcgaaaaatgctgtaagcaattacattttcacatatttacgcctcgattgcattctttttgccggttggatttggtttttgggggttgaattctattttttaagcagggaggggaataccaaaatattatcaaacaaaaagtcctgctttcatagatagtacaattttatatatttgtactgtctactaaagtaggactatatcacacaagccagcgtctttaatttttacatctaagccgcaggaatattcttcagctcattctgctcggccactctaaagaatgggagataaatcacaatacctattgcaatcaaaatacactcaaaaataatgtttctccaatccatcgagctcatgtaagcctggaagaagaatggagtaaacgatggatcaacaatataacccattccaatccagtgaagactttcagcaaagtaagtcaacacaatgttaataactggtgcaatcaagaacggtattcctagaataggattaaagcaaattggagtaccaaaaataattggttcattgatactacaaatgcctggaataattgaaagcctaccaagtgcacggtacttttcaactttactattcatcataagaatacacaaagccaacgaattaccagaaccacctaagacagcgattctgaacatttgcaaattcatcaaatgagtaggagcaagtccctttgcaactaatgcagcatttgcaccagttgctgctatacctgtagcaaatacaattgggaaaatgacattactaccattaaccccaattagccaaagcaaattacccagagtcacaatcaaaatgtaaccccataagctgttagctaaaaaggtagctggagttaagcatttcattataaaggtagtaaaatctgcatgagtcattccaactagaattagatctgcaccatagaaaataaagatattaaccagtaatggaatcaacgaattaataaagttagctaccattgggggaatagaatctggtaatttgagcttaaaattacttttttcaattaaacgattaatttcaactgcaagtagtccaataataattgcaacaaataaaccattcgttcccaaattattaatgtcgatcttattatttttatcaacagttgtagtgaccattaagaaagtaactaacgaaatcatcccatcagttgctggatgctctctgcggtatcctttgctcaattcatatgcgataccaaaagcacaaatcatcccaaacatacccattgtcatattatatggaatagtaatttgagcataatgagcgactgcccaatatttccaggcagcaatccatttcatgaagaaattagctgttgctggattatatttatccataacaattggagggttagcaacaattaagaaaaaggaaccaattaccaaaaatggcaatccgaaaagcataccatttgaaatggcctgtaaatgcttttcatttccaagtttttgtccaataggcgttaaaactttatccaatttagtaatcagtgattcttttttagcagtagtttcggccatcagaaatcacctattttctttactaaaacaaaacgctttttaattaaatttgatatggattgaacttgaatgcgttcggaattaccttactgtcatcccagttttcacgaatcttatgatattcgtcccaataatgattattcacctttaattgcggtgtaacttttgaatcaacttcaaggaagtgcatacttcctcttcccatcttcttgccacgtgtagtatgcttgtccaaagcataatccggaatcttagggacatagcctaaagcaaagtttttgattataatgttcttaagcaaatctgatgaacggtctttagttgattcacacagatagcgaatagcgtgaacaaacatcatagcacgatccggttcgttgtaactaaagttttgacgcatctgatttaagctattgataagaattggagcttttggattacccatgccgatatcttctactgaaattgcttgaagacgacgccataatttttcttccatttgtggggatgaaatgtacatctcataagcaaattcacaggcagccctttctttgcctttccgaatcgatttttgtaaggcagagataacttcatccgcagctaatccattacgtgttcttgttcttgcccatggatcagctaaaaattctctatctctgttttgtggcacttcgtttttcttaacatcattttctgacataatgagtccttcctttgacacacgaggagaaatacaatgaatattcaaaccatctgcgagaaatatcaacttaataaagatgaagaaaagatccttctttatatgaacgatcaccgttcagagctgaaaaatctaaggattcgcgaactggctaaaagaacattcacttctcccagctttatcgtcaagacctgtaaaaagatgggactttcaggatattcagaattggtctttctaattacagatacaccaaagttccctaataatactgaaaatgacttaaaagtaagatcttgcgtaaagcctttctccaatttgatggataagcataaagactcaatgatcatgatattgggcagtggcttttctcaaaatattgctaactatatgagtgagtatctaaatttatacggttttagatgtactgcaaattcacatcttgaattactccgtaaaaataaagacgctctaataatagtaatcagcaattctggagaaaccaaacgtttagcagaactgtgcattcatgctaaacagaataatagagatattctctctttcgtaggtgaccgtaattcaactattgctaaaaactcatcacttgtaatcagttcagatacgtttactccatcatcctttgatagtcattaccctcagctgttttttggtctaacactcatctattttgaattattaatgagttactttttgtctaagtaggtacctttccttaagacactttcatcataagcgctaggcaattgatttaaaaggttttagggcttattgaaaacatattcttatttttaaaaacaacctgaattgtcaaattaagtgcaacagttaggctatgaagaaatatattgcttgaagagttcttctgctgtgtgatattggaggattcggcgatatttgtggttaatggcattggttgcctgttgaacataagcttttgacttgtctttcatgctcttgcccttagagaagaattgacgcaaaagaccattgcagttctcattggtgcccctttcccatggagaatatgggtgagcaaagtaaatctggcagcccttgatcttggtcatatccgcaaactcagagccattgtcaaacgtgattgatttaaaccagtcaggatgtctgtcaatctccttttgaagcagcctttggcatgtacttgcccgatagtcaggaatcttgataactacttcaaagcgtgtggttctttcagtcaaagtcattaaagcaggctgattcttgcgtctgatgcctttaaccagatctccttcccagtgcagcggagcttttctgtcttcaacctccttaggacgctgttcaatggaattgccaagatgcttcttgtgcaaagcgtgaccgccatggctgtgatgacgcttgttcctgcgtcttttgagcttcataggcagatcaatattgcttatgtccaccaagccctgatcaatatacgatagacagtaggcgtgctgggacaagggtagcctggcatagtccttttgaattcaccaacgaattcatcaatgctggtggcatcaaatttagctttaaagcgtctggagagcattctcaaaaaaacagcataatgctttaatggatcccgtttatagtagtttctgcgtcgcttatcatgatagatttgtgcaatatcagcgtagtaatgctcatagagtaaataattatgatctctttgcaggacgctaccacgtctgatttcacggctgatagtcgatttgtgacagccaacctttcgagcaattgcggaacaggaggttatgcctgaatcaagcatagcttgaatttgtccacgctgctcacttgttaattgatgataatgtctagagacgctagaatttgaattagtcatgaagatcacctttcttgatttttggtcacttcaagttcaggtcttcatggcctttttgtttaacacttagtgttgcataaatccgggatcataaaaaataaccaacatccattaaaaatgttggtcataaatttactaaatattcttttttattacatcttccgaataaacgtgttcatatcgtatgggcctaccttgtagtcagagcgatccacttcttccagagcatttgtcttaatatagccctttttcttcaagaatgaaagatcaatagtttcactagtcatattggacaaacgcaataccatcgtatccttgatagtataagcaggataaagtgctgaaacttcaataccatctagtaagttaaggtctaagtaggattcctcatctgtgatcttcggcagattatctggaaattcaatgtcccagatcttgttatccaaacgatttacaaacaaattgtacttttgaatttggtaagaaacatttggactaagccatttatcaagacgtgtggcaatattcttttcagacaactcttctccagtaaatggagtaatgccaaactcaaaatcgttattgccaagttcttctgccatcggtgttggcgtcatgacatgtcccactgaagtggtatcacctgaagcacgacctggccgccacaataagtttgacttaccaagttgaccagtcgttgccattaatgttacatagatagaatcatcaactagctcatattctttctcgcctttgccaaagaagtagagaccatttttaccgtcattttggcccacagctcgatcaaaaatataaatattaactggcttttctacaaattcatcattccaattatcatctattggctcattcttagtctttctgaaaccgccttgaatttgagtatgagcatattcagtttgcatccttgacctcattctcaatcttaaacgatgagccagcacagtattgtttatatgcagacgacaggataataccttttcgccattggttagggaaacagtcaatttgaatgggacttctttcttttgcccatcttctttcaaacgatcatccagactgtaaggcaataaccatttaccttccaaaatcagttccttataggttgaggtttctttcttggttagttttccattccaattaagtctaatctcgtggtcctttcttagtggtgaaaagtcatacgtatcgccatcatttgcctgatcatagacagagataacatcataatattcttgattcttatctctcaaagtaaatttgccatcttggtaaacaactgtgagttgatcattggcaattgaattattgtccagctcttgcaaactagttaattcttgatcagcgtcttcaaagtgaattaccttgtaacccaagccattcattctaagcttaattaaaacatacagcttgtagtatccaggctcatctttaaactcaaagccgtttggtgtcaattgcatgatatttggtcgagttggagtatatttttctttaaccaaagtagcttcatatttatctggaaatttgatcttttttgaagctgacatgaacgtaattaatttataaccatcaaaatcataaggatcagtattaaaaactatgacatctttatcagttaagttcaagcgttgagcaattctctttttaatatagttttctaagccatcagcaatttcaaaagcctgcttaaatctgtgatcaatatcaactgcaacgttatcagttacactgcctcctaaagtatcgtgtggttgagaatcaaataattgcttccataatttaattaataatccattggaaacttgaatacccgactttttagcgatcagcatcagaggctctactcgtcttaagatatcttgttcaagcttaaagttcttgcgcttgtttctggatctaacagaagcaatagttctatgcactcttgaataagttggatatctcaattcaccctggtaagtattgagtttctttgaacgaagccgtttcataaattcagggtacgtactaatttgaacatcatttttgctatattgattaatctttttaaccgtatcagagatgttatgaactatattcatctggtcaattcctgatgggattaaaacctcatcattattaccattcttagcctcaaattcaatgcctttgtccaatcgattcttaacaaaatcctttaaatttttctttgaagccaagtcaatctgacctgtatagtatcctaatggaaagttagcagcaaatacaactgaatttcctaatgcacgccacttgaagtaaacagaccctgcttgtctcttaaaattagtaccacgccaagaaagaaaatcatgaattcctacttgattaagaatcattggtaaattggcattaaagccgaaagtatccggcaaatagcctaacatcattgccctaccataatattttctggcatcattaataccaattaccaaatttctcaataaagattctgcagcaggaatatttgcatcagtctgtgtataccaagggccaataaataattgacctctttcaacaaggtcatgaattctttctttagcttctggatgaatttctacatattcatcaatgattgacatttgtccatctaaagtaaaattggcttctggatgagattctagttcatcaagaacttgagtgaataattgatcacttaatacttgagcatcttgagtggtaaaataccattctctatcccagtgtgtatggttaactaaatatgctttaaccatgttttgcctcctatttttcatacccaacgctttgaattattgttcttaacacgtctttggtttcattaattgttttacatttatcaattaaatttctaaactgttgattttgttgcaaatcaactaaaaaagtaaatagttcttgaatgttcggatagtctttcttattaacggaaatcaaaaagacatacttaatcatgtttttatcatcccattttatcggttcattcaatctagcaaagcttacctttgattgagtggcagcatactttatcggatggggaattgcgatcccgccaccaatggccgtagaatatagatcttctcgtttatatacattgtctctaaagtcgctttcaacataatgatacttttctagatcatctatcattagatcaaggactttttccttagttaacttatctttaagtaaataaatcaatttaccatcaaacaatgtactgagacgtaaaaagtagacaattaaaatattggattaatagaggcttgacttcgatactctttcggggttaagccttttaatctgctctttatcctttcgttgttatagtattcgatatattcctcgattgcttgagttaattcttgaagattatgatacttgtattcttgatcatagaacatttcagttttgagcaggccaaagaagttctccattagcccatcatccatggagttgccctttctggacatgctttgagtaataccatggagttttaaagctcgctgataacgagggctttgatactgacagccctgatcagtatgaaaaatgcagttattaagagctgtttctttggcaaaagccttgtcaagcattgtcattactaaatccatatctggatgtttggagatagtataagaaactatatcgccaccgcagccgtctagaataggcgataaataaagcttttcattattaagatgaaattcagtgatatcagtataccattttgtgttaggcagggctgcgaagaaatcacgatgaattaaatttggagctattttgccaatagtacctttatagcttgaatatttgcgcttattgcgcctgatgcctttaagacctaatttatgcatccaatagcgaacggttttctccgtaactttccagccctctctgattaactgcaaagctactctgcgatatccatagcggccttgatgatgattaaaaatctcatggattctagcaataagctttgaccgtttaggcttgacgggctgtcgtttgataatcttgtagtatgagcttctggcaattataggtagctcagggtgctctgcaatcgcagctaatacataatttaaactaactttgaattcttgccttagatccgtaatcaccctagctatttcttctgatcttcttggtccaaggcacttagtttttttacgtattcgttcacaatacgcaatcgcaagttttcttctttcagctgctggatctctttctccagttccttgcgagatttctgcttttctttggtcacgggcagggcgtcctttctgtttgataatgacattatacccgtttttcttatattctctaatccaattgttaagcatgccaatacttttaaaccccagttccaaagacagctgtaagtatggtttattgccaaagattgcttgttcaatagttcgctgcttaaactctttggaatagctttggtttttagtagttaaaatttctattccatgcatatcaattaatctaagcatatagtctaaattagctagattcattctgtacgctttagccaattgactgattgagatattttcatctttccatttatgataaatttctattttttgttctttattaaatttagacatagtaaacattctaagctaaatagtgaattagttatccgacgggataattgattcactatttttattcttttgtagaattaaagtagtagtaaaacgatatgccctgaggtctttagacacttgatgtcgcataataaactggcagttttacttaagttttcaatagtctcttcgaagaatgtgggcactagatgtcgagtttagaaaattagatctgatttcttaagtaaatacgttttactactaagttttggaggtttttattatgcaagttacttttggaattgatgtaagcaagtctacttctactgtttgtgaactaattggtgaaagcaaaaatgaactaaccattactaataatcgtcctggttttattcaattgcttcatgaattaaccgctttttctaaacatccgcaaattatttttgaagctaccggtgtttattcacgcagactgcaggcttttcttgaagactacggctatgaatatgtaattcttaatcctcttaaagccaaaaaagaaatgaatatggggctacgctacaacaagaccgataaaactgatgcttatcatttagccttaattcaaagactttatcgccatccggttaatcaaagcgaatcccaaacttataagcagcttaatgctttgagccgcttctatgaccagctgacaagtgacttggtaatagctaaaaatcgacttcaccaagctctacaatcgacttttcctgaaattgaaaatctattttcttctgctaaaggtaaaaattactggcaaatagttgtgcgatatcctcattgtgacttagtaagaagagaagataaaaaacagcttattaactggttaatgagcttaaaggggattgcttttaaacacgctctaaggactgcagataaattaattgaattagcttatcaagcttatccagttgtatcttgctctagcatagaagtcgagcaagtgcagtattatgcacacagattgcttaatttaagtgatcaaagagaaaatttaatcgcaagaatggttaagttagcgaagtctttgcctaatcatgatttagaaaacctagaaagcattccaggctttgcacagaccactgctgtcagagttttagcagagttaggagatttacgcagatttagtaatcctaataaaatcaatgcttttatcggaattgatccaggcagatatcagtcaggagaaatggactctaatttaagtattactaaacatggcaatgcagtcgcacgtaagttgctttatcgagctattggacaaattgataatgcagctaagacaaatccgtgtcatatagcagattattatgaaagcaaaaagctatcctctcaaaccaaagggttcaaaaagatagctattgcttcaattcataaactaatcagaaccatttatgccctgattatcaatgatcaaccatatgattacaacgtagccacacataatcaaaaagactttagtcgtaattaattgatcaagtacattataacgctaagcccaaaaatcagatatggatctgggcttatttgtcgtgtctaactaaaaaaataaatcgacactaaaagatgtttaagttgaaatttaaacaaaaaatgaagccaaacttcttattatgcttgactttacgtagaaaagacctaaaagtgtctaacttttaggtctcagttcacaagttcataatgaccttatttttatccgaaactgaaacgaggtattgataaagttcattactatcattctgaaagttagataaatctacctgaattactggtaatttactttcataaattggcaccgttgaaattacaaagtcagtattttttaaatcactatgctgatattcatataatgaataaacacccacaatattcaaatattcactaaattgcgaagataatctagcctttagtaacatagcagtagcagttcctgagccgcataccaatgcagctctctttttatcccaacgattgttgtataacctttccattgaagcaccaacatgaagtgtgatgaaagctaactcatccggggataatttcatgttaagttgatgctctataagtggtgaagctgtcactgtcatttcataagccaatgggaaagttgaaacaattacatttagtaaaggattctttctttgtccattaatatttttaactttcagtagtaattccaagtgcttctctaaattacgaattagttctttgtcttgcatgagattgaaaacatagtcgtccttgattctatccaagaactcaatgacaatgtcatgtatctttttgtttttcacgtcattattactatgctccaacataagttgtggataatttagagctaggtgataaataaaataatgaaattctgcttcactatattccaattcatagctacggaaaacttcctcaaaaaacttagaaaccttatcaaaatattcctctctaatgtaagggatatttcgattaaaattacgaagctgattattagttttgctgcgagctaactccaatgctaagtgaatagtgatatttttatcactataatcagacataggaagccccagagctacgattaaattggtaacttttgtcagtaacttgtttaaatctaaatcagaaaaaatcaccttttctgatttagagaaacctcgaacataattattgcctcttttattatcgatataatcaataatgcaactacgaatatccgattctgaacctttcattcttaaaagatcgccatctttttgaatctttagatgatagtttttggctacctttctagcttctttcaaatacttatcaactgttgaatcactgatatacatagtggaaataatgtcatcaatctcacgcggtttggttagaatcaaaagaagaaaatcttttaatcgttttttatagtcgtcaccaccatctgtaacgataccactttctttaatccgctcgaccaaggacttaaacttttctcgatcattaataagtagatataagccatgtccccgtttattttttattgagacatcgtatatcttaagagaattattcaaattcttaatatcgcttcttaaagttctagttgtgacacctaactttgctgctaatgctttaggggaaatataagtatcattatttttagaaattaaagacgttaaaattgattttaagcgtggttgtgtaatagacatgcaaaagtcacctcatttctataaaatgtagcttatcatattatctaatattcataataaatagatactatcttatcatgtgtaagcttaggcaattttactgtattatttactacctctagctttttaagtggctcttcctttaaatctactaattctactttattaggagccttgttaaatttgagttcatcttccttttctttaaatgaagcattgtacagtcgaataacgtatcctttacgctcttctgctttttttactgtactagtagtaaattcacccttcgtttcaaaaagactatattcttcagggagctttcttttgactacattaaatggaaagattaatcttccatttaagaattccgcatattcaaacacttgcaacccagtcttaaattctttggcgacattagttacgtttgctttttcaaaatcgcaatcagtaatatatactccaaaatcaaaacttaagaccttcttcaattcagcagcgagagttgctacagtagcatcccctgaagctcggccagggcgatacaataaatcagcttttcctaatctgccataagttctgaataaggttaatcgaatagttgaatggtgttttccaatatcttcgtactcacgtacaccgttagggaaaatagcaaacatattgttcttatcagataatgaagtataagtttgcattgtattaatcgaaattggcttttcttgccaatcatttggatgttcttgccaatccaatattgccttcttcaattcaaatggtctcttaatgctgccaaattgaatatcatcaattgacccatcagtcactatttgagtatcaaaatcaatacataaacgatggtctaacggttggcgattatctgtaactaccctaaatccaattactgggttatctttctttaactttatctcaagagataccggcattaagacaaatgcttttctatgtgcacgttcatctaaatcagctggcactctaaaatcatagtcaatcttaagttcattaagcaaagcagatttattagcttttactttaaatgcttgatcggtagaataaattacccaatcttttttagctggtgaatagttataagaatctccatcatcgccgttgtcttctaagatagcttgtttatcgaaaacgcgcccatctgtttttcgggtgattcttaaacttccatctaaatttacttcaattttgtaatactcattttcaatcgtagtttgattgcttactgacagttcatctgcttttcctacattaggaatcaagtaatattgttgatatcccattggaggaatatttttgactactaggctaatctttgttttataaactttttctggctgataaattctatttcctgggtttaattgaacagttgcaccattaacttcttctgtttcatctttaaaaccggcaactacaaagggaataggttctccatctttatcttgaatctcaaaattctgcgctggagtgtatatggttttagtaactaatccactttttgcaacaggagtggtattgaagaccgttaacgtaattgccttgtcgtcaggcttttttatctgaaccgagatttgccgcaaagttagttcaactaaacttgttgccatatctctagcttgtttatatcgtaaatagatatcttcattaacattatctgaaacactatttgccattgaatcatgtgcagaattttcaaacattttttcccagatatcatcagctgcacctttaggataggaaataccaaattgggtacccaaagttaaaacaggttcaagaatgttagttaggtagtcttgaattaaagtattcattttcttcaaatcagatcttgaagaatagtttgttttatgaactctcatattcttaccgatattgaattcaccttttaacatgttcagcttaggtgctaccttatcaactgcagcaatatattcttctaaagaactaatcttaaatttaaaatctttatttctttcatttaatttttctattacttgaggtagattatttctcgctggtgccatatcagaaccttgaggaaaaagaatttggtctgttgttgcttgtttaactacactagcaaagggctcagatgtcataatcttatctaaattattttcatcaattagaccacctatgaaataaccacaggccattcgataaacattaattcgactgccatcttcacctttccaaataaattctgaatgcgtagcttcataattgggaaaaccacgccataaaacagctttatcaattcccaaccccttatagatttgcggcatactagattcctgcccaaacgaatcaggtacatagccaatattcatgtagcctcccaacttactacatattttcattccatataaaagattacgcactatattttcaccagatggcaaaaactgatctgtctgtgtataccatggaccaataataagttttttatttttaacaagattctgcactttctttaaatcttgtggacgccattttaaataatctgcgatcaaagatgcttgaccatctaaaataaagtgattaaaacctacattgttttccaaattattaattacatcttttagatcttttaataagtaaatctgtgcgcgagaggtagtaaaaaaccactccctatcccaatgcgtatgtggaactacatgaactgttttaaccataactaaccttcttttctaataaaaaagctatagccaaatttaaactagaggggaaaagtactttgttattgactatagctttttgtttatttttcaaattaactgatttattcggtagtaatgtctaacttaatatcgtcctcgctaatctttttaccgttgtcttcagtgaagttggcaactaatggagcaacaacggcaataaacaaagcacaggctaaaataccacaaacataagcaggaatattatcagcagttaagatacctggaataccacccaatggaggtatgtgtgaacttactcccattagttcaccaacgccagcacctaaagcaccaccgattacatttacaaagattaattgtggggctttcatccagaatggaatagcaccttcagtaataccgaatgtgccgttgatcaaatttgtacgccccatttccaaaagttgtggagagaatctcttcttaggccaaataaaagtcattaaagcataaccaagaggaatagcacaaatggcaatattagtgtaaagacatggtttgtaaacaccttccaggaagaagaagttaccagcagcccaagcagctttattgacaggaccgcctaagtcaacaccaatcatgccacccataataagagccaaaatcaaaccattagtatggtcattaaccattgttttaatccaagccaacaagccagtattaatccacgctaatggacctgcaagaattaacccattgacaatagctacagcaccagttgttaacaatggagttaagatcaattcattggcagaattccacttttcaggaacattaatatgtttacgacaccaacgagcaacgtaaccagcaatgaagccagctaccatagctccaataaaaccttgttgagtattagtagctaattgaccaccaataaaacctgcacccaatgctggtttatcaccaatggcataagcaatataaccaccaattactaagttgaccaagccaatacctatccaaccaacttggttgacttgatacagcatatggaagaagccagtagctttagcaaatttacccagatcatttacaccacaagccatacctatcaattgtgggataccaacgataagggcaccaccaataattgtaggaatcatgtaggaaatacctgtcatgatatagccttgccaatcatgcattagtttcttaaatttcatcattttactcccttcatttcaaagtagttaaacattattctgttaaactaggcacctttgactacagaaacgcatttcttaagaagagcttctggagcttgaatacaagtattaatatcaactctgataactttctttcccttaaaacgatccattccttcgatcttttgatcagagccaattaagacaaaatcagctttctgggcttcttcaggtgtaatttcatgaactcgacccataattccttgctgctcgatcttaacgttgtaacctaatttctttccggctaattctagtgccttagctgccattggcgtgtgagctagcccagctggacaagaagtaataccaacaatatttacatcactcataatttattagctcctatctttttcctaatatactttgcaatttcttgtgaatcgtttaatgttttcaagttttgcttaaaatcatcttccaataaagcagtcgacagattggcgagcatctttaagtgagtattacctgcatttttaggtggtaccattaatgcaaaaacatctgtaactggtttattatcatatgtcttccattcaataggtttctctaagcgaacataaataataccaactctttccacagcttcagatttagcgtgtggaattgcaaatccatcttgcaatcctgttgaatattcttcttctcgctttttgaatgatcccaacagaccttcaggatcattagtaaagccaatttcttcagcatattcagaaattttctttaacaaactttctttatcagcgacgttcacgtttaaaagaacatcttctttttcaaacttcattaaatcacctctcgtattatataaattgtaattagtcatattgtgataattaatcaaattagtatttgctttttgatcttcacatgttagcctctaattgtcattggctttggtcaactggtctaggttatcacctcctgcagttttgtctgctttataagtctgccacccagacagttcctttatgctctaactcacatgctgtattgattgcttctttttgctagtccttgagcaattgggattaggtgcagctttcaaagaagcaaccagtgaatacttatactggcgagattgaacttaagaactgtaattagggggttaacatgtgaagatcaaaatctatgatcagaaatttgaaagaaaggaggccatttccaatgaaattatttgtcggtattgatgttagttctaaagatttacaggtcgttgcacttgattcagaagatcaaaacaaacgcttaattaacgatagctttgtcaatgatctttatggtgctagtgaactgaaaaaacaaattttagatctagctcaaaataaacactatgatcaaatcattattggcatggaagctacatctatttacagttttcatcctgcttactttttccaaaatgacgaagatttacaaaagctcaatgtagagactgatgtaattaaccccaaagaaaccagcaggtttcataaagtctttgaagaaagtaaaactgatcctctcgatgcttattacattgctttgtatctaagctttggacattatcgagtaagcattgccagacaagacaactatcttgctttagagcgtttaacgcgtaccagatatgaattagttcaagaactgactcgtaccaaacagcacttcattgaagctttatattatcgggttaataaactaatcactgtcgataaagataagattaatactcctcttttcggtgctacaatgatgtctattgtaaccgatagtaaaactctggatgagatcgcggatatgcctaccgaagacttaatttcttacttacaggttaaaagcagaggacgcttttccgatccagataccttggctaaagcaattaagaaagctgttagaggttcatatcgcttaggcaaagtaatgactgattcaattgatgcagtgctttctgttcattacaacatgattcaaagctttaatgaatctattaaagatctagaaaaagcaattgatcgtatcgttgatgcattaccagaaagcaaaattctggaatcaattcccggtattggcaaaacctatacagctggtattatcgctgagatcggaagtatcgatcgctttgataaagaagaacagctggctaagtatgccggcctaacctggaatcaatatcaatcgggagatcacagcaacgaacatactccaatggccaggactggaaacagatatctaagatattacttgattgaagctgccaatctagcaagattacatgatcctgttttcaaaaaatattaccaaaagaagtatgatgaagctgtctactcgccgcataaacgtgcttgcacattaactgcaagaaaattagtacgagttatctttaaattgctcaaagatgacaaactgtacaggacaccgaggtcttaatttcaaaaattggtctaaatttaaaagtaaacaaaagtttaacattaaaaaaatcaacctttaccaaggcttagtttcatatactcaaatttatgatcaaaaagaacaaatatcatcgcctttcatttgacttattaccacatgacttgtccgttgggccttctttgtaaccccttacatctaatatgattgcatattctcttctataagtaatgtctcctaatttccacttaaagtggaaattaaatatttataaagttacgtcatgtcctaaatagcttaataacagttcacaaaacatcatatttgcccatgaaaaccacggtcgagtaaaatcactaggatcattaggattaaaactctcatgaatcatattgctaccattggttgtgttagccattaaatacaataaattctgtttttctgctttagtctcttgggttaaccctactaatgccatacctattggccagatatttcctttaggagtatgcggacttccttgaccactccaatattcaccaatatagaaatatggattatctggagacaaaatgaatcttcttgtgttttgataaatgtcatcagtaggtttaacgtaaccaatataaggagcagacattaagctaggaacattactatcatccatcagcacatagttgcctctaccatctacttcataggcatattgctttttaccattgtgctcaacaataccatacctttgaattccttcattaatttcattttgcagtgttttagcctttgcaactatatctgaatcatccaaaatacttgaaaatatttcttgaatataatttaaaactactacggcaaacatgtttgaaggtatcaagtatccatatgtacatgcgtcatcactcggtctaaatccagaccaattcattcctgtatatgccacaggcgttcctttacctttattctttaaagtatcagttggaacatcacagtccctttcaaaggtgtagttagaattctcatgatgttgctcagttttaatagttgccagcatctttttaattccagaaacaaaatttgcatcaaattgagctgtttcacctgtgttcttatacagtagatatgccagctgtactggataacagagtgaatctaattcatattttctctcccaaatccagggacccatttttgctttatctgtttgatgaccttgattattggcagtcatattaaatgcattagcataaggatctaagttcatattaaaaaattgccgttttactactcgagtaataatatccttaatgttatcgtcagttttagctaacaataaatatggtcttaattgtgcagatgaatctctttgccacattgccggaatatcaccggttaatacaaagatatttttattttcatcgacctttaaagcattctgcaaagtatctaagaaagtcttgttaaaaattgtatataaacgttcatctttagtgccacattctgcttccacttcattcatataattctttacttgttcatcaataatgtctttcattattttcacccccagccaaattataaaacgcttttataattaaaaagaagacattacttttcaccttattgtggaaaacaaataagccattgcctgtatttttacaaagcaatggcttattcattattaaacggttattcctcacccggtgcagatataactattctcattttaccagtgaaagtgaaattcttcatctcatttggaataattaaattagttccgatcttcaaatcatatgatttgccatcggcttctaattttccttcacctttaataactgaaactaaaagatatggatgatcctttaagccggtcttccatgtaccatcgaggtcaatttgccataagtagaagtgtggtgaaacaggtggttcaactaaagtcttgatttctgcatcttgatccttattagtcttaacatctagcttaggatcaacatgtggcacagttgtaacatcaattgacttttgcgtatgaagttcacgctttttgccgtctttaccaacacgatcataatcgtacaaacggtaagtaacatcacttgattgctgagtctcaataactaaacagcctttagtcaaagcgtggatagtacctgcaggtacgtagaaaaagtcgccagctttaactggaacctttctaagtaatttgtcccattcgcccttatgaatcatttcagccaattcttcacgatttttagcatggtgaccataaataatgtaagcacctggatcagcttgcatgacgtaccaactttcggttttaccagaatcattttctaccttacgggcataatcatcatctgggtgaacttgaactgaaagattatcattagcatctaagaattttactaataacggaaattctttagccttaggattaccaaaaagttcaggatgctttaagtaaacatctcttaaagacatccccttgagtggaccctctgttacaatagaagcatcgtccttgtagccggaaatgatccaagcctcaccgacttttccatctggaatatcataattgaaaatatcttttaatttacgtccgccccaaatttttggtctaaaatacgggatcaaaaataatggttccatttaaaatcacctcatttttactttagctcatttaaaatcatctagaaaggtatggcttttctttcttttgaagaaaaaagatacacttacgaccacatatttcaagttggtttggatctataaaaagatataaattttataatatcagtcggttataaccaattaattatttatgtaattaggatcttatttcgtgaaaccgtaaaatagtttgtgtaaggatgaatgattccttaaatttatttctttaaacattagaaaaaggagttcctttctcgtatgattggtttgaacaaaaaaacacatacagaaagaagaactccttcatgaatgattttaccaaagattttgctcaagctctattcaatccagacaaaataaatgatttattgcgcaaagagctacaacaggctgttaataacttgttagaagctgaattgactacctttctgggctatgatccctatgccagaaatggctggaatactggcaattctagaaatggtgcttatttccgcaaggttgatacccagtttgggccaattgaagtgcaagtgcctcgagaccgcaatggacagtttcatcagcacacgctgcctgactacaagcggcactcggatatcttggaaagcatgattatcaagctatattccaaaggcgtaaccaccagagaaatagccgacttgagtgaaaagatgtatggcagtcattatagtccagcccaagtatcaaatatttccaagcagatgttccccaaggttgaggcttatcacaagcgcaagctaagcgacaagtttttctgtgtctatttggatgcgacataccttcctttgcgccgagaaacgtttgagcgtgaagcagtctatattgccattggcattaaacctaatggacataaagaagtcattgactactgcattgcgcttagtgagaacattgaagtctggacagagatgcttcaaaacatgaggttcagaggcttgatggaaattgagtccgatctgctggtcttctataattatcccaaacaaatcagagcttcaatttattcaaccagcatgattaaatcctttaacaacgtcatcaagcgtaaagctaagcctaaagcagagtttccaactgaacagtcgcttgatgcatttattggtatccaggcaatgagctacaatgaccgctatttcaaccgaattcataaaggctttggtcaggttcaggataccttagaatcctattttgattaaataaataattaaaaaatcaatttgcgagaaagaactatttacacaaaagatttgacagtttcataaattatctatcactagttactacttataagactaacatcttacttaatcaaactttaaacaaaaaaataagaggtgaactacaacatcgtcacgttatagttcatctcctactttaagttgtttgacaaagagtcacattagctagtctctgtctcttactacatacattaatagttaagaagtggaaattaattaccaaagcacctctatttcaatgaacctgggaatctaaattcatatgaactaatcgggcctactatatcaagactagttatttgtttgactaattcttgaaataaaattattgcgttattaacaccataattgtttactattttttggattttttctggacttttaactttttttggattctcaatatcataaaaataatccactttaatatttaaagtcctatattcagaatcattatcattttcttcatttgagcaattggcatgccccgataatgtcacaattgcatcgtttgcagaaatagccacagaaatatcatcaaacataaattccaaatagaaactgtcttgttgctgttctagttcacctttgtattcataattaagtttattaattataaatccattatatttaagctgtactgacatcgttatctcctatttctttaccatttgtggttgaaaaactgatttttttattcccacctgatagaaagacagtgtcttttgtttattagagctttcgtttatcttcatctttgctattactttagaagttttatgctgtaatgttttattatctatttcttttatttttattcgttttcttgaaaaactagataacttatttaaaacttgctgatatttttcttcactactttctaaatcaattccctgctcaacttctgtatacgtgcttaaactcaaacccgttaattttgctgcttcatctctatttaaattcaaactaattctttttctgaaaatcttttgtgataactggaattgatatgaatttaatctactattatttggattgattttattgaacttcatgtctttcgtttctccttcctataaaattcttttccctattattcaccaattgattatgaattagttcagccagtttcccaagttgatcagtaagtaaattcatttttcttatttttctttgatctttagtaggaaatttagtaaatccatatgtccagacaaaatatactttactctcatttaatgtaaataaaattctacagtttttccttacgccttcatttgtttcagaaagaaagcgaatctcatatacatgattttgtgacatcaattttttaacaatctcgtacttgatatatctgttagaatttgaaactttatactcatccttaaaagaatatccaataataatcccttcttttacttcgggctttaattgttcaatattaccactactatctaaagtaacatttgaaagaaagttgataattcttaacaccgattcttgaatattaggattaagattatattcatcttctaaatattcttcggctaatttttgctcagacaagttatcatttatcaaatagaactggcgcatgggtcactctcctttgtctaaacattttacgtcaaaatcatgatattttccattctttgttgaactacagtaagtgttaatgtttttgcgatagactatcagccatagtctaaccttattctttagcttcatcaattatatcagcatccccaacctcagcacaaaagaaaaccgactccataatattccctgtcaatagctttttattccatcaaaaaaggaggacatagttctctttgataaaaaatctattccactaaatattttataaataaaggtgatttctatgtcctctcttaatcattgtattaaatcgagcttgacattaaagatgaaaatatcgtttttaaagcttgtttgaattaacaaacaataatgtcttaaaagataccacgccaaaataaaagcgaccttcgttcataagagcaaagaccgcaaacttgttaattgtctcaccacagaaattaacactcaaattctaaccttacattgcactaaaaatcaatacaactctacgccttctcaagcaaactatggtcaatcggttcgccctttaagtgggcgccacgaatgttcttggcaatcattgacttgcgtttactctttttatcgtaaacccagtcgccttgggctgtagtgatattctcaactttggtagtatcgccatcgattctcactaagaatgctggtgccattgttgagcgcttgttagggcctgaagcaaaaccacggtttgtcatgtatgaagttactaatacttctttcttgttgcctttaacgggaacagcatagtatgaataagttgaagttctccagttaaatggaacactagctaccaagaccgctgcgtcgccattaagtggtttataaccataagttaagtggtctgaaacccagccgagcatggcaacattgtcaccgactttggcatctgcttgctgccacaaatcatcaccagtaccacggttcaaacgcgttgtagcaaataaatagtacttgccgttcattggaatgatatttggacgttcaatttcgtcggataccatcaagctgttaactaatggtggtaaaacttcagcaaccttaggattgttctcattcttggtaaggcgaatgataccaatagtagcgttagcccatgttgcacgactcttcatgtcgtcattagcagtcaccttcaagaagttttgtaaaacttgcttaggcgtaccaccatagttcttccagttatagacttgattttctccttggtaattattgctacctgttgaagcttcaaaaattaggtaacgttgaccgccaacagaaatcacatgcgcatcacgcatagcaatattatctgcacctttattggtagacttccattgcttgtatgtctggtagtgatatccgtcgccttggaataaaacatgacggtgacttctcttagctatcgaaattgtgtttttcttcttgttaaccttcagcttcaagttaactgttgcaatcttttggtgattagtattttcacgggtgtctacatcagcgtagaacaattgaatactgccatctttgtttaccgtagctgagcctgaccattcttgatcagttggcttagcattaaaaccaaagattggaccagcacatttccaatggttaagattattgtcattgtacttgttatagagcaaataaatgtgggcatcattttggttagggattcccatcatggcgatcattaattgatagcctttatagttaacaactctaccagtcttagcatcttgtactggccatgaatcccaaatttctagttccgctacttgaccagtttgtgcatcacgcgtaacggttgccggcatgtttttaatctttttagcattaaaatatggtacgcgatattgcgcatcttgatcaatcatctttttagccacgccagcatattgatcatagctccagtgagtactagtatccttatcaagctcattaaagttcaactttcttacttccttaagttggacttcagttaaatccttaggattaacatctgcagttcgcaatacctgaatagtttgaggatctaacttgtaaactactgcgtcgttattttggctatagctagtattactaaaaccattagaaacattatcactaatagattgagtagtatcaccagctacttggttttgagcgttctgatcagtattagtagtatctgcaacaccagcactgtttcgattatttgtattgtcagtgatgtttgccccagtattatttcgcattgtttgattttgagcatgatcagcagctacatcattattttggttagtttgtgcttgattttgatctgatttatcttgttgatcatttgtggtcgtagtttgggtatttctttgttcagttgtaggttgttctactgtatcagctttaactgttagactgttatttatgttaaacaagccaagtaaaacagctgccgatgcaaaggtaactaatgtgcttctcttgttcatctctgttcaattttccttctgttatctcatagccagtttattataatatcttgttcggatttttggaaccttcttaatcaaattgaaatattagccaaataatttctctccatgaaaaaagccttcgctgatggataaaaccgtcatcacgaaggtacgatcattagttattatacaagattattaaaaagtgtagtattttaggacatacttgagaactatttgtgatccgtgttccagcacatctcctgtttatcgccatattaaattagaaactataatagtcttttgtatcaattttttccaagaatatgaaaagatcaaaaacctatgttcaacaaacagctgatgccattagccacttttcctttaaacgctgtctctataatattttcaagaatttttatatatcttgaaacaatttcttgtgctatccaatcccatctcactaaatattcttcaaaatcatcctcaaagtatttctcagaattgacggaatatccactaagtaagttatttttccacttagacttaacgttaggcttctcaattaaccaccatgtaatcactatatagataacggtttctacatcacaccataataaagatgcttcttcctctttcgagcatatgaataacgctaaaaaaacgagatcccatgttgaaagtgtctttttccaaaatcttccagagacaggtagccaatcttcgccatattctacttcatttatctcattattaatatatgaacaaaataaagtctctaaattatttgcagttgcatctcctataattctttcaattaaattttgtttcatttgatccaaagattgctttttcttaatatcttcaattttaaaaatatcgttaaaaaagtccttatattgtgatttcaatccacactgcaagtcaaatccatttcctattacaattaatcggtttatttcatttaaatttatttgcacttctattctttcctcctacaaatagagcatatcctaataattatacttttccttattgtcaatctctttttatcataaagctgtaatgaatttttacataaaaaagcctttgcgatagaacgtatccattaagtgaagggattgatctctctatgtttagaataaagtaatacgcgtggtgctagttaaatcgttctagacaataagccaaattataagctaaaattgcaatttccaaccggctttgaaagcctatcagactacgtgctcgattgttctcggcattgtaataggtcagaagcgaaaagtcgctttcaattgttctgcgaatagccatcaattgatgatcattgtgctttttagctcctgtcatatttttacgatatggtgtccaaagttcgtaacccatttgttttagctgttgatgcagttctttgcctaaatagccttcgtcgccaagaagatagtaattagatggatgggtattttctatcagttcaactgtctccctggcatcatgaactgatgcctttgttacgacataatcaagaatgtaaccgtcatcgctaacaatggcatgaactttgaaaccatagaagtaaattttcttggtggccttataaccaatgttggcataaccgcgaaaaattttagcacgatagtttcgaattggttggcaaacaggtaccggaaagctgtcaatgatcaagaactgtccattcaggtcaacctttttattcatttcttgccgtatctgataaatcaattgcaatagctgacgtgaacgccgattaaaacgtgagtgtgataaacaattgaaacattcacagaatcttctttgtgattcaattcctgtcttagcttgccagataagtaaagccaaaatcagactgtccgtagttttaatttgatcaatatttcgccgatgagtaaactcagccggtgcatacaaacgataccagtgccgacaaattatcactaaatctttaaaactaacttgtaaatggtggctaaaacgcttaagcttaaggcagttcaatcagatcagactcttttctattattactatttacaagtcgagtctaacaagattggacttttttattaactaaaacgatttaactagcaccacgcgtaaagtaatatatcataatgctctatgtcttcacacataataaaaaagagagctaaacgaattgatacaatcccactaaagtggacgattgaaatacataaagtattcaattatccatggaggtgggattttttatgtccagaaaaagtaaatattcattcgatcaaaagatatgggcagttgaacaatacttgaatggtaataggagcagcgttgaaatagctaaacggcttaagatgccaagtaaaagtggagcgatgcaagtaagaagatgggttcatcaatatcaaagcaatcgtgatacccttctaagtaatgctcaatacaataatcattactctaaggcatttaaagaaaaggttgttcaagaatatttagctggcaaaatgtcgttaccttctttagctaataaatatggcattagaagcaatggaacagtatcagaatgggtttccaagtataatagtcatatagaaaatcgggactatgatccccatccggaggtctatatgactaaagcaagaagaaaaactacccagcaagaaagaattcagattgttcaatactgtcttaatcacgacaagaattacactcaaacagctgtcaaatttgattgttcttaccagcaggtttacagctggacacacaaatatctagctaatggtgaaacaggattaacagataaacgaggcagacataagaagccagaagagctaactgagttagaactggctaatcgaaaaattaaggaattagagcgtcagctcaaagaagaacaaactaagaacgaattcctaaaaaaattagatcagttagaaaggatgtgcttgccggacaaccaagatacagacaagccgcaataaaaagacgctggaaacaagaaacatatcagttaatccatgactgccatcaaaagtacaattggaagattgatttaatgtgcaaatgggctaaaatagcacgctcagcttattacaaatactttgatcctaagcgcaagccgagtaagcgtgaagaacgagacaaaaagattgaagcaaagatcattgaaataaccaagtctaacaacagtctgtttgggacggaaaagatgaccatggcagttaatcgacagatgtctgatgaaaagccggtttatcataaaactgtttaccgcttgatgtgtatcaatggcattagatcacaaaagcctagataccagaagctaaagttcaagcatacaacgcctgagaaaacggccgaaaacaagttaaaaagagactttaatgcatctagacctaatgaaaaatggtgtacagatatcactgaagtcgttgctgctaacctgcctaaggcatatctatgtactgtgtttgatctatatgatcgctatcctgttggctacgcaattagtaaacgaaacgatactgctttagttcaagcagcctataagcaggctgttaaagcataccctaatgctcatccgcttttccatagtgatcgtggttttcaatttactcgcgcacctttccaaaaccaattaaaagaccaaggcatgacgcaatcaatgtctcgtgttggctgctgtattgataatggtccaatggaaggctggcaaggcattatcaaagaaatgcgagttattcttcatcctcaagtggccagttatgatgaacttaatgattctatttgtaagacaatagattactacattaatgaagatccacagaaacgttttaacggtttaactgctggtgaaatgcgcaaagaagcgatgaaaggcaatattaagaattgccctattgcaccaaatcatcgaattgagaaatactggcaaaaaatacacgaaaagaaaataagagaagccaaaaaatcctcagctgattattaatcaactgaggaataaaagctttatgtaattctactgtctacttgacagggaatgtatcaaatccagctctcttaagtatgctccacataccaacattcatcatttactgtacattatccactattagctttcaagtgttagtttttatatgtaacaagtgatgtgattaagcaaaaatactaacttatttgtgattgacgagtaaggtcttaataagacatcttaacgattcggaactatcaaggtcatcactaaagacccagctaatatgacttttagttacaataaggtatagaggctgattatcagagacaatgacacctttatcagtataagtagtgtaataacctagatggaatttttcaacatcatatgcactaacagcatacagataataatttttcacccaatcaaacttggtaggaagtgatttaaattgttgctttactaaagatttttcctcttccggaattacatttaaattgataattcgtttactgtcattcaatatggtctgatagagttcgtttagtccttttaactgttccccgttatctgcataaacaatagttgcagtattgtgagctaatgccgaattttgagttacgggactattatgaaggtgatatttcaagttccaactattactaataaaaatgtggtaaaccctatcttgaaatttagttaattcatagcaaagttgtttaattaacagagatagtgtaccttcagaagtcgctttctcaacacttttagtttgataatctcccaaactaaatatattaatttacgcgtggtgctagttaaatcgttttagttaataaaaaagtccaatcttgttagactcgacttgtaaatagtaataatagaaaagagtctgatctgattgaactgccttaagcttaagcgttttagccaccatttacaagttagttttaaagatttagtgataatttgtcggcactggtatcgtttgtatgcaccggctgagtttactcatcggcgaaatattgatcaaattaaaactacggacagtctgattttggctttacttatctggcaagctaagacaggaattgaatcacaaagaagattctgtgaatgtttcaattgtttatcacactcacgttttaatcggcgttcacgtcagctattgcaattgatttatcagatacggcaagaaatgaataaaaaggttgacctgaatggacagttcttgatcattgacagctttccggtacctgtttgccaaccaattcgaaactatcgtgctaaaatttttcgcggttatgccaacattggttataaggccaccaagaaaatttacttctatggtttcaaagttcatgccattgttagcgatgacggttacattcttgattatgtcgtaacaaaggcatcagttcatgatgccagggagacagttgaactgatagaaaatacccatccatctaattactatcttcttggcgacgaaggctatttaggcaaagaactgcatcaacagctaaaacaaatgggttacgaactttggacaccatatcgtaaaaatatgacaggagctaaaaagcacaatgatcatcaattgatggctattcgcagaacaattgaaagcgacttttcgcttctgacctattacaatgccgagaacaatcgagcacgtagtctgataggctttcaaagccggttggaaattgcaattttagcttataatttggcttattgtctagaacgatttaactagcaccacgcgtataatagtaacgattataagattaagaggattaaaatggaaaataacgcagaatcaagtaataaaccgatacatcgtcatcgccatcatcaccaccgtcgtcaccgtaagttctggcgcggtttttggattgttattggcgtgatcattgtagtcggtctttttgtttgcgggatgatctataagaatttgcgtgatacgacgcaaaacatgtacactcccgttgctaagactaccaagagtaataaaggacgtactcttgataatttactgaatgagaaaaagccaattaatatcctgttattgggtacagatactggtgccatgggtcgtcactggaagggtagaactgataccatcatgatgatgtcaatcaaccctaagactaatagtacaagcattgtttcaattccacgtgactcaaatgcaatcttcccagattacccacaatatggtgtaaccaagatcaactcagcttatacattgggtggagttagtgaaactattaagacacttgataaatattacagtgttccaattgacggctacatcatgatcaatatgggtggtttgaagaaggcaattgaccaagttggggggattgatgtaacttctccattaactttcaacaatatgggttatagctttgtcaaaggccagacttatcacatgaatggtaaaaaggctttagcatttgcccaacttcgtcatggtgaccctcgtcaggattatggtagacaagagcgtgaccgtttggtaatcatggccttgcttaagaagtctgtttcaccttcaactttgcttaattcaagtttcttgaattccatttctagtgagatgcaaactgacttgaccatgaatcaaatgtacaagattgctatggattatagaaaagccactaacaatctttctcaagatcatgctcagggtgtaagtaaggaaactcagaatcctaagtttggcacaatggaaattgaagtggtaagtaaagatgagcgtcaacgagtttctgataagatcagaacagcgctagaattgccacatgttaaggtagctgctaataaggccagctatattatgaatcgttaatcgttattaaaggaaaaggtaaatggaacaagagcaaaagcaaactgaaaatacaattgatcttactcaattgctacaaatttgccgtcgccacatctgggcattgattatctggagtgttggtttggctttagtcggctggggcgtcgctaattttattatttcaccaaagtatacttctaatgcacagatcttggttaaccaaaaggctaataagaatgacccgaatgcggcatacaatacgcaacaagctaacatgcaaatggttactacctataaggatatcgtgactagtcacgttattttgcaagatgcttctaatcgtttagctaacccagttagagtggttaaaaaggctaaacctgctaagtacaagactaatgcagagggtcgccgagtattagtaagaaaggctcaaccagaagtagttgaacgtagcggtaagagttacagcgtttctactagcgaattagccaagagcgtttcagttaatactcaacaacaatcacaggtcttctcaatttctgctactgcagatacacttgaaaaggcaaaggttgaagctaacgctgtagcgcgttcattcagagatcaaattcctaacatcatgaacattaacaacgttacggtcgttgcgccagcaactgatggtaatcaatcatcacctaatgtgaaactctttaccttggctggctttgttattggcttggttttaagtttcgcagtagtcttaattcgtgaaatgtccgacactacagttaaggatgatgcattcttgactgataacttaggtttagttaacttaggtcaagtttcacacttccatgtgtcatcatcatttgtcattagaaaaaagaataagaattctaatggccctaagcgtagaagtcgtcgagtataggagaggagaagtaaatggcattatttagaaaaaagcgtggtaccgacgatacaattaagcatggtgccaaattaatcacagttgctgatcctcgtagtgcggtatctgaacaattcagaactatccggactaacattaactttatggcagttgatgaagaaattagtaccttagcttttacttcagctaatatcagtgaaggtaagtcaaccgttacggccaacgtagcgatcacctatgcacaagcaggtcgcaagaccttgttaatcgatggtgacttgcgtcgtccaactttgcacagtacgttcaacgttaagaacaatactggtttgacaactgttcttacttcagaagctgacgaaatcaatttaaatgatgtggttgaagaaagtggaattgataacttgtcaatcttgacttctggtccgattccaccaaacccagctgaattgattggttcacgcagaatggaaaccttcattgaattggttaagtcacattatgatatggttatcattgacttagctcctgttcttgaagtatccgatacgcaagagttggctagtcaccttgacggcgtagtcttagtagtacgtcaaggcgttacgcaaaaggctgggattactagagcagtgcaaatgttaaaatttgccaaggctcggattctaggctacgtcatgaacgacattagagctgaaaacggtggctatggttacggctacgggtatggctatggttatggatatggcgctgagaagaaaaagggcctgttcggtagaaaaaagagtgacgatcaataatggttttagtcgatattcactgccacatcttgcctggcattgatgatggctcaaaggattggtcaacatcaattagattagctaacgcagctgtcaaagacggcgtgacgcatgcaatctgtacgccacatacgctaaacggtcgttacactaatcataaggatgacatcatctggctgactgatctctaccaacagaagctagatgaggccaaggtgccgttgacggttttcccagggcaggaagttcgcttgtcgggtgacttaattgatgcgcttgataatgatgacatcttgttctgcgatgaagatggaacttatatgctattggaatttccaagtgatgacgtgccaacttatgcgcaggacacgatattcaaggtgatgcagcgcgggattacgccgattattgtgcacccagagcgtaatagccgcatcttgaaggaaccagaagttttgcaagggatgctggaacaagggtgtctagtgcaaattactgctagttcttatacggggatttttggcaataagattgaagaaatgtcgcgcaagttgattgcggcggggcagggatgtacctttgccagcgacgcacacgacttgccaagacggcagtatcaattgagtgaagcttataaaaagatgagtcaagaattcagtcaagatctagctcagcagtggcaagataatgctagaagtatcatcaatggcgacccagttcagatggattggcacccattaaagcagaagaaaaagttctggttattttaatgcttggtgcaaatatgcaagtttgcttctaagttgcgttaaacgtgataagattaataagagagtgtattcaaatagactaaatcaaacagagggtaagaggaatatgatggtaatggagaaactacaagttaatcctgcaaaagttaacggacgaccagtgtatcacacgattaagcgattattcgatatactagccagtgctttggggttgattttactatctccgttatttttatttttgataataaaaataagacatgaagatggtggtcctgcattttattctcaagaacgaatcggtaaagatgagaagccgttcaagatgtggaagttccgttcaatggtggttaatgcggatcaaatgctagatcaactagaagacgaaaacgaagttgatggagcaatgttcaagatcaagaatgatccgagaatcaccaagattggacacacgattcgtaagtatagtcttgatgaattgccacaactttggaatgttttggttggtgacatgtcattagttggtcctcgtccaccactgccaagtgaagtagctgagtacactgactacgataagcaacgtttgcttgtgatgccaggttgtactggtctatggcaggtaacacgccgtagtgaggcagacttcgacgagatggtttggctagatattgtgtatatcaaccattccggctgctgggaagatttgaagttgattattaagacaattggggtggttattcatcctaatggagcgtattaagttatgaaaaaacttcttgtagttgctaaatcactcggtggtggtggatcggaagttgctcttatagagtttctgaatcatttggatagaagtaaatatgatgtaactctccttttgttagataatgatacagaatatagttatcgtttaaagaaagaaattaaaattgagtacgcgtggtgctagttaaatcgttttagttaataaaaaagtccaatcttgttagactcgacttgtaaatagtaataatagaaaagagtctgatctgattgaactgccttaagcttaagcgttttagccaccatttacaagttagttttaaagatttagtgataatttgtcggcactggtatcgtttgtatgcaccggctgagtttactcatcggcgaaatattgatcaaattaaaactacggacagtctgattttggctttacttatctggcaagctaagacaggaattgaatcacaaagaagattctgtgaatgtttcaattgtttatcacactcacgttttaatcgacgttcacgtcagctattgcaattgatttatcagatacggcaagaaatgaataaaaaggttgacctgaatggacatttcttgatcattgacagctttccggtacctgtttgccaaccaattcgcaactatcgtgctaaaatttttcgcggttatgccaacattggttataaggccaccaagaaaatttacttctatggtttcaaagttcatgccattgttagcgatgacggttacattcttgattatgtcgtaacaaaggcatcagttcatgatgccagggagacagttgaactgctggaaaatgcacatccatctaattactatcttcttggcgacgaaggctatttaggcaaagaactgcatcaacagctaaaacaaatgggttatgaactttggacaccatatcgtaaaaatatgacaggagctaaaaagcacaatgatcatcaattgatggctattcgcagaacaattgaaagcgacttttcgcttctgacctattacaatgccgagaacaatcgagcacgtagtctgataggctttcaaagccggttggaaattgcaattttagcttataatttggcttattgtctagaacgatttaactagcaccacgcgtactattatatactcaagaacccattttgaccacccttacatgcggcaaatacttgaggtgatgtgcgttttattgctactgaaataatatattatcggtagatacgtaacatgcaaataaaaaatgcatccctcgaaaaatggaatgcattgctgctagattgagtttaaacggaattatttttcatcttactatcgccttgccttaaattgtactcacactgtaccatatttagtaagacctaaataaccaaaaagtattaagaagtacattaaatagaagttgaatagcatgttaagtattgaagaatcaatcaaagaatttgaaacatattttcagggtaaaccaaatgaagttgaagtagtatcacgaactataaaacaaaaaagtagacggccacataaaccgcctactttatcctaattgttatgatgatcacttgagttagttaaatcatcatttttagttagatcatctatatttccaactactccaccaaatagtgtaaacacacctattccaccaaaaatactaccagccaccgaatgcctttgcatcaccaaaaaagcagaaatacaaatacatagaattgttactattgatactactatcagagatgtccatgcgagccaacctcttcttttttgacgagcaacttctaatctccgtctatgcctactttcttcaacaccattattaattatttccttagcagcattcggatacaatttttggtatccctcaagaatatcaggaagcggaattggtccactatacatctcaagataagccattatttcttttttggtttctttaggcatctcagatttttgaatttgatcaagaatctgttcatctagcgaatctttatctgactttttctttatatcattttctagctttttacttggcttttgatctgccataagatattattccctttcttaagtcgtcccctatcctttgccaatcactggcaatagctttttcctcagcattactattactagaatatatcaacttgtttaataatttgacataaggcatagctacatttttcgataattttttaaacactaattgaatatcggtaaacataattctcacctcattcataatctctttctttattaaaagtatacttaaaatttgactcgtggtaaagattattcttctacatgcaatccacttctttccttattataagcatctgtaatacaataaacttaacagcaaataacgaggtgtttttatgattgataatcaacctaaaaagacaaaagcttatatcgcgggcgtaaacttaaacgaccaaaacttcgactactacatgaccgagctggccaacttgactgaagccaacaacatggaagtagttgggcaaagctttcaaaatgcagaatcaattgtcgccggaacttacttcggtgtcggcaaaatcaatgaaattagaactatggctcaaggcttaaaagcaaaagttttagtccttaatgacgaattgactcccgtacaaattcgcaacttaggaaaattaaccaaaatgcgagttattgaccgcacggaattaattctggaaatttttgccagccgcgctcgaactaaacaagctaaattacaagtgcaactggcacgtttacaatatgaattgccgcgtctacatccctccgagaacaacttggaccagcagcgtggtggtggcttagctaaccgtggtgccggtgaaagtaaactagaattgaaccggcggacaattggcaagcaaatttcggctatcaagaaggaattgaaggctgttgccggccaggaagaaatcaaagcggcacgacgcaaccaaagtcgcatccctaaagtcgctctcgttggctacaccaatgccggtaaatcaaccacaatgaacggactattgcgtgaattttctaaagaaggagcctacaaggaagtcttcgttaaaaacatgctttttgctacgctagatacttccgtgcggcggatcgacttgaaagacaactttagcttcattctgtctgacactgtcggtttcatttctaaactgccccacaacttggttgaatccttcaaggctaccctgcaagaaacacgtgatgctgatttattaatcaacgttgttgacgcctctgacccgaacatggtccaaatgattcggacaacacagaacgttttggatgaaattggcgttaaggaaattccgatgattaccgcctacaacaaggctgataagactgatcgcaattacccacagatcgaaggcgacgacattctttattccgccatcgatccaaaatcgatcaaactactggccaacttgatcaccaagcgcgtttttgccaactataaaaagtttgacttgatcctgccactaagcgcaggcaaggaactggcttacctgcatgatcgcgcccaagttttacgtgaagactaccaagacgatggcgtccacatcgaagcgaacatcgcgcccgacgaccaaggacgctttcgtcaatatttggcctaactcgattaggaaaaaatatgaaaaaacataatctgctgttcctttttgccctcacatttttgttagttcctactaacacgcctgtaatggctgctaaatatagtgctagtgagtcaaaaaaggtgcgcacttttcaaaaaagctatcatcgtttgagccagaagaattacaatcagactacgctctttaccgtgcagccaaattttggtattcctttttcagcaggagtgcttgaccctgattacatcaaaacttcaatggcttatgtcaattattaccgctcattggttggactgcctgatgacgctaactatgctaatgataacgttaacgcacaacttggtgctgcagcgctagcttcagttaacgcggagcaaaatctgcgagctcacggcttacaaggttacgtcaagcctggctatatcagtgatactgactgggacacagcggaaaataccacattgggcaatatcaatttttcagaatcaactagcggaaccacggctggcgagatcgttaccgatctgatacgtgaagataataatattgcaggtaatggcaacatcggtcaccgcggcatgatcctctcgacgcgagccacccgaatgggaattggtgctgcttatggcactgaaaataatgtcttgtattctgttgaacatggactatttgctgatgatattttgcgtcagcctgtgaaaagccgaatcgtttatccagctgccggcgtttttccttacgaattagttggtggtaaaacgccatggtcttactcaacaaccgagcgaatttctggtcagccgaaaatttacatcacggatttgaccaccaagaaaaagcggcaagcgacgcaggtgcgcaacttcggcactgctctttatggtgacggctacacaacgacaatcacttaccgacctggcaaaaccaagttgatcagcacgcacaagtaccgtgtgcaaatcggcaaacattatagctacagtttcaaatttttcaggcaaaatagcacattgaaaaataaacagattgtaaagcatcgaaaatgaaatacgttgatatgcaaaacggctcaagcagttgtacatcctgcttgagccgttttagatagtaacaaatattgtagtctgttcaacaatcttcatgtaaaataatactcaggtctattgcagcggttagctaccgctaagacttagtaattttagcatggctacacacccctcaagattttttaagttacggaggtggaagcatgcataattgggtagactggagaagtaggcttacaaatgattgcttgggctattgcgtatgcgataacaaaaaaagctaatcacaatgattagccgaaacaacagtcatcttaagttacgattggagttagcgaccgacactcgctagctccttttcttttattattttaatatgatttagaatttattgcaatgtttagaagcgcttattctacgccaatgacgtaacgcatgatgaatcaatagcttgttataccaagcataattgtgcttcatataattataggcggttgtaaaattttccagttggctagccgcaatgaattgattgcgtgtccaatgccaatcctgagtaggataatataaaattttcactcggattacccttcctactgtaataattgcccgatcatgatgataacgcgtgcgagcaacattgaggtagctaccaattaaagtattgcgccagtatcgattatgcagataatttttctcccaaagcaaggccctgcgcaataccttagaaatgcagtaccattcgcgtttgccgttaggcaattcaaccaaacaccaaagatattggtgtctcttcgccattcaatccaccccttctaattaatatcggctttaattataccgctactagctattcagttagaaaatcaataatgtcagaaaatattaggtcatgatgtcaaatctattcaactgacatcatttgtcctaagaacgcatttaccgcttgcttaatatactcgctgcaaaggtgagtatactgcgttgaatttctggacatggctctgcttaagcggtcttgatgggtgtcattttaatcccttctttaatttttcagtctagagaaaacttttatcaatacaaaaaagcaagcgcattaatcgcctgcctaaaagtattccaaattacttctctatagcactctcttagcaatcgatggtgtaaagtaactcgataccgtttgcaaaatagtaccttgctccggtgttgctgcgtttacatattgattgtttcctacataaattgcaacgtggtatggagctgtcgttgaaccccagaagactaagtcacctggctgcaagttgttcaatgaaacagtttgaccaaccttaacttgatcataagttgttcttggcaagttaacaccagccgctttttggtaaacatattgtactaagccagaacagtcaaatgaatccggaccttctgcaccccagacataattcttacctatctgttgtttagctagcgcaacaattgaagcggccttactagtagcttgcgttgaagaagtttggttagtattttggctagtcttcttgattgccgtattaacaatttgcttagccttcttcaccttagctatcttttcagccttcttctgagtagccgttttagtagctactgccgctgtcttcttattaacagtagtctttgtctgcttagcttccgttttcttaacagttggtgcttgcgatacttctgctttttctccagcagtaacatctacggtataacgcgcttcaatccattcacgcgttccaaccttgtaccacaagttgcccttcttatcgagtgcagtctcagctacattccagaccgtgccgtccttagcacggtagcccatgaattgaccattctcatagttggtccaaatattcaggctcttacctggtaaatagctaatcttaacttgcttaatcgcagtaaaattagctgcacgaacagttttcattgatgtgattgcggaaacacccgtaacggtcagggctgcagccgctcccactttaaaaaaattatgtttcataattgaatccccttggtagcgaaacaggtgaaaacttttcacctaaaattacccactcttactatgtaacgccttcattattgcatgtcctacctcaagaagcaaattagaacattacaatattacaaaaaagacggatcactggaatccgtcttcattacttactatcttaatttaaaacacgcttagcaacacttgggtagaagtatgaactcaaagtttgcttgattacgccttgacctggtgtagcagcgtggatgtattggttgttaccaacatagatacctacgtgatatggagcacttgcactaccccagaaaagcaaatcacccggttgaagattatccatagaaacggttgatccttgcttaacttgatcataagtagttctacccaacttcacgccagcagcgttagagtaaacatattgtaccaaacctgaacagtcaaaaccgttagttcctgtaccaccccaaacataggacttgcctaattgtgctgaagccaaagtaataactgctgaagcatcaccagttgcttgaactgacttcttagcctttttagctttcttaactgcttgagccttatctgaactagcatcaacagtatattgagctaaaatccattggttatcaccaatttggtaccatgtacggcccttcttatcagtcttggtgtcaaaaacattccaagtagtaccatgttgagcacgttgaccagtaaagtggccaccattgtagttgtcccatatgttaattccataacctgcaatgtagttaatctttactttggtagtagcagcttgaacagtagcattagttgaatctggcttgatgacatttactgcagctacaccggtcagagttaatgcagcagctgcggtaacttttacgaaattgctcttaatattcatcaaattctcctatatgttttcactatatatataagcattcttagaatttattacttaagctggtaacgaaaatattaattcatcgaaaaatctttaaatttctttaacgtatttaacaaaatctataataatgtcctaatgttacagtagtgttacaaaagcaatactgatttaataaatattacgtttccgtcaaaaagaaaaatagctagggagatttccctaactatcttaattagatattttatttttaggaagactaacgcaattagtcgattacacgcttagctgatgatgggtaaaatgaagctaaggtttgttgcttaacattttgaccaggagctggagcgtgaacaaacttgccgttacctacgtagatacctacatggtagttaccccagaataataagtcacccttcttaagcttcttagttgaaactgaaatggtcttaccaagagtaatttgaccgtaagtagttcttggcaaagtcttgttaatagcattcttgaaaacgtaagtagttaagcctgagcagtcaaacccgctaggaccagcagcaccgtaaatgtaaggcttgccgatttgcttcttaacaagcttaacaaccgcattacgctccttagtagtagctgattccttcttaactgaacttgaatcaggattggtagtttcaagatctgaaattgagttgttagtattgatagtagtgcttgaaacatcatcagcgtgaacagctggaacattgatcattgaaataccggcaaagaatactgataaagctgcggtgtattttactaaagtacgtctaaaattcaaaattaattgtctcctctaaaaattactaaatttgtttttgatttcttaaatcagttgacggtttatataataccgactgaatgttacacgaatgtttcaaaagagctaccatcgcgttaagaaacatgttaaaaaaacagattttatgtaaaaaaaggagaagcaaaatgctagcgaagctttgctacaagggcatcgagcgcgtttttagtttctgttaaattgtcgttaactaagatatgagcgtattgcttcaaatcttcaggtaaagcatttaattcactgccgctaagtctttctttaatcttggctggatcatcgccccgctttaaaaggcgctgttttaactcttctttagtagaagttgtaacataaagaaaataagccttgtcacctagctgtttaatgtaggaataaatgcccttgatatcgacaattaatgaaaccagatcacttttttgccaggccagattcaaagcttctcgacttgagccatattgataagagccgtacttaatatgctcaaaaaagtgcagctgtgcaaaagtttcgtctgtttcaaaatgatatgacacatcttgtttttcgcctgatcgcatcggccgcgtggtatgcgttaatacgcgtggaataccatatttttcagttaaatattctgaaacagtcgtcttgccagcaccactaggtcctgcaataagaattatttttttcaaaacctgattctccccacttgaaaatgttgcttttttataatagcattcttgtgttataaaagactaagactttttctcggaaggaagatacacataatgaaaaaagcagacgtaaaagttggtgcaatcgttggtgccaagtcagaagaagaacttaagaagccattccaaggcaaagttgaaaagatctacgaaaattccgcattgcttgcaattacttcatacgatcccgttgacaccactgctatcagcgacttgaacaataagatcgtagttaacttcaagaatttaaagactgctcgcgctgccaagaacagcaagactgcttcaactaatgaagttaagattgaaaaaattgccaagaagaacgatgataaaaaagaagcagacaagaagtaaaatttgacaaaaatagcccgcgcaatgtttacgcgagctatttttttgcctaaaattaggacatcgatacgagaggaaatattttatgaaagaaaaaacgcgaactgttttattttggtttattttaatccagccctttttagacctttattggttctacaacggtaaattagcggaagttttaccatttactctacctacgattatccgaattttagctgtttttgtgattttctgtatgtttttcagtcaaaagcaaaattggcaaaaattagggcaagacaagtggttaattctatatttagccctactaattttgtattcgattattcacttaatccacgtcaaaaattttaacagcattaatcctaatgactacaattattcaaccgtaagcgaaattttttatctcattagagtgcttttacctctgatggtgatcttttttacaaaagaattgaatttcagtcaggagcaattcagacacgttatcgaaggcatcagcggacttttttcatttacaattgtcattaccaatctttttgtcatttcgcttagaagctacgagacaggcccgattagcgctaatatttttgaatggtttgttaaccccaatatcggttactcccatatggcctccaaaggcttcttcaattttgccaacatggtatcagccgtactctttatgctggtgcctctgatgctttacttcatgttcagtcgttttaactggaaaatcgtcactttgaacgtagttcaagctttagcgatgatcgagttaggaaccaaagtggccctcatcggtttaatcggtggcgtgattatcagtattttgctgtatgttttccacttatttattgttaaggatgttaacaaaaacggcaaagccattatcgtggcgcttttaatcgaagcgggcacctttgccatcatcccctttggtccagcaatccagcgctataattatgaaaaatatttggctcagcaatccgatgattctttgacacaggccaagcgagaattaaatgctggcttaaaaaaatatcctcaaggtaaacagcgcaaagaatttttaacgaatttcatcggcaatcattatcaagattacgccttaaataagaagtttgtttttaaaagctacccttataaatacgatcctgaattttggctcaaaatcatgaacgagccaggcaccgctagaatgcaaaaccgacatgtagaaaaagcaatgctcgatcaagttgtgaagactaacaacaatcggctcgacaagttcctgggcatttcttacacacgagaaaccaacattttcaaccttgaacgtgatttcactagtcaaatttattcacttggttggatcggcatgctgttgttcattgggccttatgtcattatcctgctctacgctttaattaagtggctaatgaacaaagaaaagcggacttatttgatcagctcaatgttgctttcaatcgcctttatgattttcgcagcattctcgtcaggtaacgtaatggacttcttaacagctagcttcatcctggctttcgttgaaggcagcttgttagctagcgtaaccagaaaagaaaattaaacataaaaaaaagttaggtagttgcttgcctaactttttcttagtttttaaacattatttttcttgcttaataaagcttgaatctggcacccgaattaagtagtaccgagttgctaaatgacctgcatgcatcccgattccattttgccaattccgcttgtacttagccgtataaattgccacgtaagcacgttgatactttttatccattttagccaattccttttttacataaggaatcttctcggcattcacatcaagcgcagtgttaccataagcaatcgaggcataatcactaccaatcgtgaccttgctgccatcgcgataaaaagtataagtttgtgagccatatctctttttagcagaattaattgttacatagcttgaatttcccgcacctgtacgcattatcagtggctcatacttcacgcttgaagtaatgcggtttgcatcttccaggtctggattgtccataaaagtctgattaaacatccaacctgcagctaataaaagtactacaatttccacaatattaagagccatattcggccaactaaagcgtttatgctgtttgataatcatcttaatccgtctttgacggatgttctggacgatgaaaactaaataaagaatgatggcaacccaaatcaggatcccaatgatattccagctgaacatatctcgccctgctatataaaacatagaaacatgcagaagttttcatatttctacatgtcagaaagaaatatattttcctttctttgtcttatttactgctgtcttcatcagtattccgatattccatctggggagtaatcgcattgactaactcttgcagcttaagggcttagccagcccattgtttttattttgttaacgctagtaaatttaatactgcattgtcatcacgatcattgctatagccacattcataacaaatgtattcattatgcttggtgccatgttttttattgccctgcagagtaattttgtctgcaccagttttgacatagccacaattggcacatctttgtgttgatggatatgttttatcagctagaattaattctttgccataccattcacacttgtaagtcaagacttgtctaaacttgccaaatagtgacctttgcatgcctttggaggctacatgggtcatcatcatttgtttgacattcaagtcttcaatgacgatttggtcataattgtttacaagctcagtggtaaatttttgcaaaagatcattctgaatattggctgctttgcgataatcacgctgaagcttggttctcacttgcaggtaattattgctttggcttgccgatttaccgttaactcttctctttttagacaatactctttgataatgcttgattcgcttgtacagtttctgtagttttgctggcaaaacattaatcttgccttcagtgtagttgaaatgcccaacgttgacatcgatggcggtctttttgccagttttagcctttagtccagcctcttcttcataggaaagggcagcgtaataatgtcctctttctctaaagatgctggcaattttaacctcttccatctttaatgcctcgtatgctggaatatcaaaccaagatttaatccctctaggcttatctaatctaagcttgccattaattatcttggcgcgatcagttttaaagccttgacgtggagctttcttagatttgaaatgcggcttgccccaatcaggctgggtcttgtcaaagaagttcttccaagcattagccagatccttgactgctaattgcagacagcgagcagacaaagcaaattgccaatcagccttgttattgactaattcatcccgcactcgatgctcattaggactaggattattatccttgtctaaagtccgagcttcatacatgtcttgccaggttgctaaagctagattccagcagtatctgcgatagttacaaagacgttcaagttctctttgcattatcttatttggccttaattcgactacctgagttttgatcatttgtttcacctccaatgcaaacataagtttagcaaaggatgtaacaaaaacaagcgaacaaaatattaaatttttagcagcagttaatttgcttctatgttttgcctttctgaacaaattacctgtatctttttctatattgccattaaattctatatttcagctaaccatttaatcctccttttttttaattatatggtaaaaaaagcaaaatttgaataggataataattgaatacttagttaaatagtgagaagatcttactagtacattagatttattagggaacattatggtagcaatagctttttattcaattactgggcaaacggaacgttttattaagaaaactcaactttcggcccatcaaatcgacgatgccaaccctaagtatgatatgggaaaatcttatatcttaatcgtaccctcatatcaggacttcatgatggattcagtcgttgattttttaacgtataaagataacaaaaaaaatattatagggattatcggttgtggcaaccgaaactttaacgacctctttgctcaaactgccaaaaagatcacggcaacattgaaagtgcctattttgtatcttttggaatttagtggtactaaccaagatgtcaaaaatgtacgaaaaatcgtacacgatctttctgctggtgagagtactaagcaagtccaaaagcctaaggaattacgtgggaatatcagctttttgagtgattttagagattaaatatgactgaaaaatattacaaagcaattaactggaatgacatggaggaccgggttgacaaatctgcttggtcccgcctgaatgatattatctgggaaccccgtaatgttccagttagagaagataaaaaagaatttttacaattagacaagccggtgcaagatgccttgcttcacgcattcggagcactatctttttcatctggactccaaatgaaaaatgggctagagcaaattaaggtagatgccatcacaccagaggaagcagctgtgctgaatgccttgcaatatttggaatctattgccaataaaggctacagctacgttatcaacgagttgacggactcaaatatagcaaaagacgttattaactgggctgatgacaatccttacctgcaaaagaagattcggattttgaataaaatctaccaaggcggggatgcactacaaaagaaggcagctaacgttatcctagagacagctctctatcattctgccttctacgctccgctttatttattcggacaaggcaaaatggtacgaacagctgaaattgttaagttagctttacgtggcacttcatttggtggaatttatcctggttacaagttccgcttaggctaccaaaaattaggtaaaactgagcaagcagagctaaaagaatggatcgataacttgtacgatatgctaattgataatgagaagaagcacattgagttaatgtacaagggcactgactggatcgatgatgttacgcactatctctactacagtgtcaacaaggcctacctcaacctaggtttttcagccaagtatccttacacttctgattcaatcaaccctattattgaaaaaggggtcatcaagaatgcagtgcttgaagacttcttcttctacactaacgatcactcgctgactaagtttaaagaaattaaataattacaaaagacgcaatcgaaaattcggttgcgtctttttttacttcttagtagttttcttggttgcctttttagtagcggttttcttttctgcttcctttttttcaggcttcttatattcacgtattgtggttagcttttcaataattgcctccaccagttgatcaacaatcttcgctggatcttgttcgatctctacttcactggctaattgatcaattctaaagcctgaaacattaacgtattcagagcgcgtctcaaagtaaacatttaaaggatattccttaccctcttcaaagaagttagcaactcgtttgtaattgctataaggcaaattgataatatttgtctccaaggcaaaagtagccggccgctgacccgtcactgctagttgcgtttggatcaatgaattatgcttaaaagcagcgataacttccttgaccatcttttcagcatacggcttgattttgctcttcgacttgctaatgtcggcatatttaactgtttcaagatcttgaatataatcttgattttcaattttttcgttgagatcttttaaattaatttccaaaataaactttcctttttcattggttataattacaaaatactacaaaaaaattttttgtcatcctttttaaggattcaattcaatatttttagctttttatttgttaaaatgacactatgaaaaagcaaaaatttgatcttaagtatttatttttactcattcccattacgttaattctcattataggattgatttacctttttaacaaaaataaaatcgataatgaaattaattggatgacaatgaaggaagaacagcggctcaatgtcccgctagaaaatcaactgcccgatctacccaacggctgcgaggttactagcctatcaatgttactgaattactatgacattaaggttaacaaatatgatctcgccgataatattgctcatgttgattctttcaccgacaacggtaaatatcgcggcaaccccaatcaaggctttgtcggccatatgtctgtcgctaatgctggctggtgcgtttatcacgggcctttatttgatgttgcacgtaaatataccaaccacatagaagatgcctctggcagcaattttttagcgattctcaagttaatctccgatgggcatcccgtgctgatcattaccacaaccacttttaatcatgttaacaatatgcaaacatgggaaaccaatactggtaaagtcaacgttacaccgtcatcacatgcctgcgtgataacgggatacaacaagcaaaagaagcttgtctatgttaataatccttacggtattaaaaaccaaccggttaattggcataacttagaattgagttatgaccaacaaggacgccaggcactttacatcaaataacaaaaaagggcaagccacgaaggcttgcccttttaactcaaggcacatgctcaaagcatatgtggacgtttaaactgttcacatcagtgcgtccaacatcagcacttcccgtgcttgccacttaaggcggatgtcctctatctcataaatatacacatctcgcgttcattaatcgactcgtcagtcagtaattgtactattttttatgtttgatgtacagtctagcacttttaaaatgacgatatttaaatttataaaaaacttcagtacacatagtcgataacatgaaacctaaagcaatagcaccagtaacaattgctactcgtagaagcaaattctctccttgactataatcccccacaactaaagcacgtactgcttgataagcaggcacgcccgggactaacggtactaaggcaggaatattaaagaccgtcactggactttttttaatgcgtgcaaaacacaagcccaaaatacctatcaaaaaggcgccaattaaatttgaaatcattcgcccaaatcccaaattaaagcaagtccaatatgccatccagcccactgtgccactgactcctgacaggtgaagatcgcgatgcggtacattaatagttaatgcaaaacccaccgaagctacataagaaaaaatgacattaataataatttctaaccaaagtggcatttttatactcctatgaatttaagtacaagtgcaactccaccgcctaaagctaaagcggttaacacagcctcgcacattcgcataatccctgataataaatctcccatgaatagatctcgcaaagcattagtaattgccaagcctgggactaaagtcatcagagcgccgatcaaaatattatcagtaatcatttgtggattaaaatgattgaataatactgccaagatccccatgaccattgctgcaattagctctgataaaaaacgaatcttagtatattttttaaactcataatacgaccaaaaaccaacagcccctactaaggcagcacctgggaaatcaacccagtcgtaattatccataaacaaaaccatcaaggtagcagacaatacagcagctcccaatacctggagccacattgggaaagtaggtgcttgtgatactaaagcaatcttttcttttaattcagaaagagtgatttttttaactgcaaattggcgcgacaagtcattaacccggtctactaattccaaattgatgttgcgatcacgaatttgtttcatctgacttagcttgccaccatctaagctcatgaaaacacaggttggcgtcgcaaaaacacgcggatcatcaattccggcattgcgagcaattctgagcattgtatcttctacccgatacatttcgctcccgccttcgatcattagtcggcccgcagttaaacaaatatccattacttcttgataaaattggacatcccgcttctcagacatagttttagcctcagttcatagtttcaatatcgatggtcttgtcgacccaatcaccgcggaaaaagtcacgttcgtgactaacaataatgactccgcctgggaagttaacaatcgcttttctcaaagcatccttggtatcgttatccaagtgattagtaggttcatcaaggaaaagcaaattagctggttcaaactgcatcttagctaattttactttttcctgttccccaccagaaagttcctttagtggactcattgcttgttgtgcagttaagcccatgcgtgccagcgcttgtcgcaattcctttggctttttgcgttcaaattcttcttgtaaatattggagtggagtcatgttgctattaggccaggttagatcttgcttgaagtaagccaactttgcagtaacagataactcatatgaaccataaattggctttaattgccctaacaatgtcttaagcaaggtagtcttaccaattccgttaaaaccagtaatcgccactttttcatccccaccaacagagaaattgaaggctgacttgaccaaagcatggtcgtaaccgatgaccaaatcttgcgtctgtagcaacaaattagaagcagtcgcaacatatggaaattcaaagcgtgccttgcggttgtttttgggcggtgtcaaaacatccatccgcgccagctgcttttcccgtgacttagcactcttagcacgtgtacccgccttgttcttgcgaatataggcctcagtcttagcaatcttgcgttgctggttagcataagccttcaagtaggtctcacggttggctgctttttgccgcaaggcttgcttcaacgttcctgtataacgagtaattgtgccaaaatcgatatcgataatgcagttagtgattcggcccaaaaagtcataatcatgactaacgacaataaaggctccagcaaaattgttcaaatagtcaaccagccaatcaatatgtgaaacatcaagatagttagtcggttcgtctaaaaccagaacatctgggctttgcaacaacaactttgctaaaattattttagagcgctgaccaccagataacttagaaacatcgtgatcatagcctaaatcagctagtcctagtcctgaggcgacttgttcaatttcagtatcaatatcataaaaattattttcttctaaataagtctgtaccttgccggctttttctaacagggcttcgtccccgttttcggcatatttggcatacagatcattcaactctttttctttttgaaataattgatcaaaagccgtccgcaaaaagccacggatagtcacaccaggtgccaatttagcatactggtccaaataaccaacatcaattttattttgccaagttacttgaccatcatcgggcaaaatttcacccgttaaaatcttgattaacgttgacttgccaacaccattttgaccagtaacccccatatggtcttctttgttaagcacaaaattggcatcttcatataaagttttatcaataaaactctgacttaaatctttaacagttaataaactcattttccatcctttaattattatccagctgattcgtgttctttttcataattttggagcgcatcaagcacacgaggccaataacgtttaggcaaaattaattgcaagtggtcgtgataaattggaaaatcactagccttcataccggtaattttagccaattcttggtcagtcagcttatatttataaacaatgcgcttaatttcgactgaagcatgtcctctgaaataagacaagccgaagaaaaagatggcaaaaataccagctagaataattgatagctgcaaattcattctaaagctgtgcaaacaaataaaaaatacggcgataaaagaaattatagctgaaattatgccgtaaataaccggaaatattgattctttttctttcttttgcataatcttttccttcctaattgagacttagtaactttacgaacttagcaaaaattgttaaagtttgcaagatacgacgttttcattattttttacataagttaagtatacttagcaaaaatgaaattgcacgaagaaagaagaaaaatgagccaagaaaagcaaaaatactattttttcccacttcgttttcaacaacaggacttaaagattgaactagttttgcctcaaattacgcaagctgaggcactttatcaagctgttgtccgcgatcgaaagcaattaggtcaatggctagcctgggctgatcaaatgcactcagctaacgatgaagcaaaatttattaagcaaattcaaaccaaaatgtcccagcagacgatgctcgtgctcactattttagtcaatggcgaacctagcggcatgatcgacttgcataagctagtgccaaataaaaaagccgagattggctattggcttgctagcaagtatcaaggccgcggcattgttactaagagtgtaacagcgttatgccaatatgcctttagtgaattgaacttgcaatacattgatctgctcgttgccgttggcaatgacaagagcagcaatgtcgcaaagcgttgcggttttaaattaatggggattgagccaaagttgattaatggtcatgacgggcaaattttcagattaattcgccgctaaaaccaacctgtcaaatctttaataatgaaaaagataattggaactagcagtgatggtaaaaaatttagcgttttgacatcacgaatttttaataaggccaggccagagcaggcaatcaaaaaaccaccaacaatagaaatctcggttaccagtggacccgtgaaaaagctagccgacagaaatttagcaaccaagtaaatactaccctgccagcaaaatagcactggagcaacaacgagcatcccccagccaaagcttgcgccaaaaaccatcgaggtcacaaaatccaacgttgcattagtaaacaacatcgtatagtcacccttaactgcggcaattactggtcccacaattgacaaggcaccaatacaacaaagcaaaatttcggtggccagacctttgcctaagtttgatttgcccgtcttttctactaagcgatcaaaatgaccagaaatatcccaagccgtgccgcataaaccaccaagggctaagctgacaataaataaaaccggataatgactcttgggcatattattagtgacattttcccagccaattcctagagctgccaaccccatcgcaataaagagcacatcttcaaatcgtttgttgattccttttttcaaaaaacagccaatactagttcctactaataaagccaatgtatttacaattgttccaatcatccttctcacctcttaagcttattttaccgcagaaaaaaagtatccttgtcggatactttttctatttaccagtgaaaatgccaaccactgcttgatgatgaacttgaactagacgaactgcccgttccttttccttcaccatagccagaattagaaccgccggctggcttatcctgattttgatcataaatttgataattcgtaaaggcttgcggatcatcccacttaatgtggttattttgatcatttaattcattttgccgcgtttcttcgttgttcaacgtttgcgttggcaagttcaagttcttgcgcacacgatcagaagtcttttgcaattccttagttgaagcaacttgaatcgaagaaccatcaatccaggcatcatgaccttgaatatagctgctcttcatatttttcatacagccacgataattcaacgccaagcttaacatatcgttgaaggtcaaattagttttcacatacttattaaaaacatcaactagcttgcggtaattactgatggtattaactgacatggccttgtgggcaattgcctcaattacttgacgctggcgcatctgacgaccatagtcaccacgcggatcttcttttctcatccgcacataagctacggcatgccgaccattcaagtgctgtttacccttgtggaaatcacaccagtcatatgaaaagtcaaacggcacattcacgtcaacaccgccaactgcattaactaagctcttcaatgccttcatatttacttcaagataataattgattggcacattaagcatggacgagaccgtcttcatacttgattcatgtccgccaatttcataagcagagttcacccggaacataaagtatttgtcacctggatcgcctttaatatctgctaaggtgtcacgtggaattgaggtcatcgttgccgagtttttttgcggattagccgtggctaaaatcatggtatccgaattacctcgatcatgccgtccttcaattccttggtcaactcccaacactaaaattgaaattggctgtcgattaacaattttagcggaagtagcagtattaccgccattcttgctatcaatcacactgtggacagtaaagtacatatgtgcggcccaagctacgccaaagcaaacagctaataaagctaccacgcccactagccgagccagaaagttccctggcttcagcgctggcgcgtctgccgcaaatgcacgattacggtgaagattaagcgatgaacgacgagcacgataatcttctcttcgttttggattttggtccattcttttgatcttttcccttcgaaattaatacaagttagtttatttgtatcacttttcgtctctagataaaataaaaataccgataattaataacttaaacttcccacacgcagaatcgctccttttattgtgattctgcgttttttaacaaatataaaaggcacatgaccttttcattgctataattaaagtgaccaaacgataattctatgcatgaaaggcttgtgccaatgtctattttaccatctcctgaccaacaaaatgaacaactattttcaaactcaatcatcagcttcatcaagaagtttcaggtgatcaagctgttgagaaaatgtggcttccgcaaggaaaaaggcattagcctgttcagcttgtttctttacgttttaagcaatgtctttcgtgaccgcagcttatatatgcagctgaaaacggatcattttaaagaaagcttttctaaaaattcttattaccgatttatgcgcaacgtccacgtcaattggctccacttcaccacactgctttctgcgcaaatcattaataaccacttgcgatctttgacttcagaaaaacgggctgattgctttgttgtcgatgattcctacttctctaggaccggcttcaagaaaacagaattagtcgccaaagtttttgaccatgtatcaatgacttacaagaaaggttttcgcatgatgaccctgggctggactgatggagcttctttcatgccaatcaattcggtgttgctgtcctctcacaagctacagaatatgattggcgaaaacaaagtctgtgatcagcgcaccattgctggcaaaagacgcatgcttgcccggactaaaggcacagacgtgatggttaatttaatcgaccaagctatgaaagcaggtcatcaagccaagtacgtgctgtttgacagctggttctcaaatccacatcaaatcgtccagctcaagcaaaggaagctggatgtaattgccatggttaaagttagctccaaaatcaaatatgaatttgaaggagaacgcaaaaacatcaaacagatttatcgtagctgtaaaaagcgacgcgggcgttcgcgctatatgttgtcaattccagtcaaggttggccgccaagacaaagacggtgctaaaattgacgctcggataatttgcgttagaaaccgtgccaatcgtaaagagtggctggctattatttgtaccgacatgtcgcttagcgaagatgaagtcattcgcaattatggcaaacgctgggatattgaagtttttttcaaaacctgcaaaagctacctaaaactaagcacggaatatcatggtctgtcctacgatgccttgactgctcatgtggctatagtctttacccgctatatgctcatgtcagtagccaagcgggacgacgaagatgagcgaaccttaggtgagcttttctattgcatgattgatgagctggcggatattacattcagtcattcacttcagctaatcacaaaagcaatggtggctagcgttgaaaaagtctttcatgccagtgaagcacaaatagcagaattcacggctgactttatcaatcgtttacccaaatacatgcaaaaattgttaaagaaaactagcaaaaatagtatagaagcccaaagctaagcaatatcaaagaattgccagcttatttgatgtgggaagtttaagttaataataacttatttttttgcgaaagatagcataacaggctaagatgtatacaaattgaaataattatggaggaaaaatatggcgataccaaacagaaatgaagtcccagaagaacttaagtgggacttgacccgaatttttaaaaatgatgaagaatgggaacaggcctatgcagcggcccaagaaaaaatcgaccaacttggtgaattaaaaggtacattagcaaaatctggcaaagatttgtacgaaggcttaactaagattctggccgttaagcgcgaggtggaaaatatttatgtttatgccaccatgtctagcgatgtggatactgccaattcacattatttaggctatgtcagccgggtgcaaagcttagctaaccaattcgaagccgctactagttttattaacccagaaatcttgagcatccctagtgataaactagctaaatttaagcaagctgagccaagactaaagaattatgctcactacttggaaatgattactaataagcgacctcataccctgccagctgaacaagaaaagttaatcgctgatgctggagatgctttaggcgtttccgaaaatacttttaacgttttaactaactctgacatggaatacggctacgtccaagatgacgatggcaacatggaacaactatctgacggtttgtactcattattaattcaatcgcaaaaccgtgacgtcagaaaaggtgccttcgacactctctatgctacgtacagccaattccagaattcgctggcttcaaccttgtccggcgtagtgaaaaaacacaactataacgctaaagcgcacaaatatgactctgcccgtcaagcagcactggctgaaaacggcgtacctgaagcagtttacgatactttaattcaagaagttgattctcaccttgacctgctccatcgttacgttgccttgcgcaagaaaattttaggcttaaaagatttgcaaatgtgggacatgtacgtgccgctaactgggaagccttctctttcttataactttgaagaagctaaggaagttgctaaaaaggcattgaagcctttgggcgaagactacttgaagcatgttgactatatttttaataatcgtgtcatcgacccaatagaatctaaaaacaaggtaactggtgcctactccggtggtgcttatgataccgatccttatgagttgctcaactgggaagataacatcgattcactttatactttagtccacgaaactggtcactccgttcactcctggtacactcgcaatactcaaccttacgtttacggcgactatccaatctttgtggctgaaattgcttcaactactaatgaaaatattttgaccgaatatttcttagaccacattaccgatcctaagacgcgggcctttatcttaaattactaccttgattcatttaaaggcactttattccgtcaaactcaatttgccgtgtttgaacaattcttgcacggagccgatgctaatggagaaccactgaccgctgacactttagacgacgtttacggtcaaattaatcagcattattacggcgatagcgttgaaccaggcggcgatattgcccttgaatggtcacgaattccacacttctactacaatttctatgtgtaccaatatgcgactggctttgcggctgcaacagcattagcaaacaaggtggttcatggaacgcctgctgagagggatgcctaccttggctttcttaaagctggttcaagtgattacccaactgagatcatgaagcgtgctggcgtagacatgactaagcctgactacttagaagatgccttcaagacttttgaaaaacggttgaacgaatttgaaagcttgattgagaaataaataatcgcgctcatataaaaaatcgatatcatttcgtaagatttgatatcgatttttttgttgatgatacttatttttatttaaattgaacctgttagacctgcatcccgccatttattggaattttcgtttaactttagctgtaattcagttaatggttgaggcagcttgaaattatgtgacaatgaataattattcagatcacgtttcaagtcaaagactaccttttcaatattaactccctgctccaaattacttaaagcgtgattgattagctctactgctgcgctatcttcgacaaccttttgttttacaccgactagaagtgatttcaactcttttgcgttttccatatcgttctcctatcacgctcatataaaaataatcggtatcattttagcatatttgataccgattatttttatcgattttaattacttaattccaaaaatctacgattaattgtataaatacaaattaacattaaaattacaatcagtgttgccaccaataccgtcaatttaattttagaagtaccataatctgtgctcaatatcttaggtgaaaagtcctgtaaaaagtgtactaccatacaccaaattaatccattggaccacactcttagataactaaggaataaccccatacccaatgtaataatcacttgaccaacagttgaaattaatgattgactagttaaattatttaaatgatataagccgaacagaattgaacatacaatagatgtccataagatatcatatttttctttacgaaaaactagcaagaaagtattaaataaaatccctctaaataaaaattcctcacagattgcgggcaatatcgcagctaaagccgctaccattatttgatacagaggcaacttaaataataatattttatcttttaatgctccaaaaagtattaaggccaaaaagacacagtagatgatcatcattacttttgatattccttgcaattttagcctttgattaaaagtcttagtcgttaaaataaaatgctcggctacatatgcaaaagcgactataaagatgattacaatcaaccacttggttatcatgttgcctacaattaaatgtggcaacacaaatgaacctattaaaagaatgattgcaagtataaatagatttctgattgttttattgacttcagccttattactaaattctacttcatcggctaatgccaagtaatatttattattcaatgtttcaccctaatacttttatatgaaataataaggctaataaattctaattaaatttattagccttattacttataactttcaaacgttccaaatactaataggtctcatcgaactattcagcatttgactaacatttcgtagagttctcccaaaattgcgaccagcatagtaattacgagagtgtcctttaccacctatagtattttttaattgatctaacgtcaattcttccattttaatactttctttttatttacctgctaagccatcacgaaggcctgacataaactgacttacgcccctttgtacatttctccaccaagagcttttaccacgaccacctacaatattttgtaattcagcagtacttagtttttgaaaattattcatttctatacctccaatactaattagcaaatttctttaccgataattattcatttcgttttcttgacttgaaaataaagttaataatgtcaactgtatctacaatcaatgcaacaactgctacaattgctgctacccaagtaccaatttgagtcttgggagtataaaaccaagtcacaagaaaagaaatatttactaataacattaaatagtctttcatttttctcctaccaagttgatatcgattaacctttcatcttattactttaaaagctaccttgtttacgtcagcttaatcagtttcctagttctaaatatatagtccaagaataacgcccctgaaatttgacttataatcgaaatacgcgaggatgcgttcactaataaaatgtatcaaatcaaacaataacatgtttaaaggatattatattgataaaaaattaaagcaacgatatccaataaaacacttctaaacaaaagttttttatagagaagagcagttaaatttctcaaaactactaaaataaagaatattatcttatacttttgcctataacttaaattttatcccaaaaagtggctgataatcttagctccagtccaaataacatttgcaaccgttcctgcagccctaatatttctaccagtaccacgaccattgtagtagtttcgagagtgactacctcctacaacacttactaatttgtttgaatttaacttttcaaaattaacagtactttccattttgatacctccgataaatctttaagcctgcctcacttagtacctctaagtaccttatcaacttacatatataactttaccagaatagtggtattttctatgacattgtcataagttagcaacatccacatcatattctgctaaagtacataatttgatccaaaactgcctactatatgagtttcaatcatcgacatctcactaattttacttagaatttagcaatttagacttaatataattaaagtaactagcttttcctgtaataattgacactttaccttgcatcccataccgcaaaaactttctttctgacttggtagtcttaagcatagtctctacttcaaacatgctcatccctttttgttggacaggataagtacctatactaataattttcccattaagtatctcagacattccttgcttattctcaatctgaaatctcacttgttgtcctttattaagtacagcaacttcagaactagggacatatgttactactctcagttttctcctattttttatatctggcatagcaacactatctttgttatccaaatggacaatagcattatcttttaatactctttttttaccattagctaaggtgagattaatcccctttgacagtttttgcccctctctatatgctctattctgcaaagataatacatgatctggcgtgataacacccatactattaaccacattttcatgtacagcaaagaaagatcccaaaaataatagaattactaaaataaaggctggcaaaattatcatcgtggaaaagttgcgaaacttataggaatagaacttactactttccaaatcttgatcactcattaatatcacctaacttttcaccaaattgtaataatagccacgctttttcattaattcgttatgattaccttgttctacaacttgaccttgattcaataccacaatattgtcagttctctcagcaatagctaaacgatgcgcaataaatataacagttttattctttaacctaattaaattatcaaccacttttttctcagtaattgtatcaagcccacttgttgcttcatcaaaaatcaataccttagcaggtgaaagtaaggccctagcaattgttaatctttgcttctgaccacctgacaaaatcttagcattttcatctaattgtgtattaaatcctaatggcaatttttcaatgtcattctttatctccgcgatttggcaagcttcttctatctctttttcagttatattcttacgacttcccaacaaaagattctctttaatggtacctgcaaaaatatatggagtttgtggcacataattcacatatgagcgtaaaacatgcttatttatacttctagtcgaatgaccattaaaagttacttttccttttgtgggactgaaaaaatcaaccaacaatttaaccatagttgacttacctgatccactcattcccacaatagttaatttctcattatctttgatcgtcaaattaatatcttttaagacatcttcaccatatccataacgataatcgacatgtgagaaattaatgtctccatttaaatcatgactatcattaactgaagttttgcccttaaattcactttgaactaaataaacttcatttaaacgattctgagctacatttgcagcttgaagtgtaggttgcaagttaataatattttgtaatggatcaataaaatatgataataatgcattaaatgccatcaattcaccaatagacatttgattatgcattacaacacttgcccccacccaaagaataatgacattcagtgataatctaataaaagttttcaaagcagtttgaaaagcttctgttttgctatacttaaaagctttttttaaataatcaacaaactgactatcaatttttcgataacgtacttgttcactgtttaatgctttaatcgtctcaattccttgaatatcttcaataattgatgaactaactaccgcattactttccatctggtcattatttaatctttcaaacctttttgaaaagccgagaataacaatagcatagagtggtaatgaagctagcgtaatcaaaaacaatgtcatgttttgaaccgccaaaattatacccattaaaattacaattgaaagatcaaggaataatgaaatcaccgtacttgccaatgcatctataattctacttgcatcagaaaaacgagaagtaatctcaccagtttttctggtagtaaaaaattccatcggtaattcaaaaatatgcttaatgtattgtaaattaagatcgattgataaccgctgccccaaaacattcaataaaaattgctgaccatatgaaaaaattgagttaaagacatatgcaatcaataacccaatagctaaaacagataacgtggtaaatgtaccgttaggaatatatgtatcaatcaacccttgtacaaaatatgagctacagatactaatcagtgtcatcagcaaagcagctaaaataatgtttctaactaactttttctgtttaaacatataagggaataatgataatagattattctttttctcctttacaggcttaaaatctgccttaggcaccataaacaatgtaatacctgtccactctttttcaaacgcctttttggacatttttttaattccactagtaggatcaggatcggctacgattatttttcttttagtacttttaagaactacataataatgtaacaatcctccatcttttatcacatgaacaataaaaggatattgaatatctttcatattgaataaggacatatctgcttttaccgcttgaacatccatattgaatttttccgccgttttaactaatcctaaagcagtagttccttcagtattggttttagcaatatgacgtaaatgtgctattgatacttgagaatgataattctttaagatcattgctaaacaagctgcaccacagtctgtttcatcgatttgtggaacataaattgatttatacgttaacatgcccatcatttatctctttctgcttagctaatttctctgttttataattatatctagcaagaaaatctttcatcattttcacactactacgtgaaaaatcttcaacatccccattaacaaatgagacacgatgctgtttcaaatcaatcgactcaatgttcttcggattcaccaaacaagactggttaatcttctctaacataggattttctttagcatattgattaatactacctaaaagttgcatttcacctgtcgtcaagatcattaataacttgtgcggggttatagttgttgaaatataaataatatcatcaatattgacattcctagtttgacgtccaattttatacgaaaaagtcattttcttcatataattgaatttgtgtaagttgtagatagctacttctacagtctttaccatcatctgtctaaatttatccaaatcagatgtttttacaatgtagtcaattggacctaatcgtcttctgaatgtaattaatgataagtctgcatgactagttacaaagataatttgagctcgttcatctcgctttttaattaaggcagccagatcaaagccagtatcttcttccgtatcaccgcctaattcaacatcaagaaagtagataccaccatctaatttatgtttcttcagataatcaattgcacccatgtaatcagttgcagatgcaattgaaaattcaatttcttcatcatctgacaaaatcatttccgcagcaccaagaattttcttagtttgctcaatttgattttgatcatcatcacaaataaatactggatattgcattttttatttttcagtcccactttcactatcaggcaaaattgttaaatcaaaagtaaaccacccatcatcaacatagtaattaacaatcattgaatcttcatatttatgagtaatttcttttacattcgctagtcctaaacccatatgatgtttcttggttgtataattcttttgacttattttatctgtcgctactccactttttctaacgcgatttcgaatttcaaactcgaaatcgccgttttcttgataatacattgcatctattcgcgcactattagagttacctgtttctttgatcaaggcctgactttcttctgcagcattatcaaacgtgataccaattattctgaccagatctaaaatattaacactatcaggaattcgagaaatgtcgtgttcacaatcgaaactataatctagacctaaactataaagtttagacaacttagcaattgcgatacttttcaagttcttctcatggatatgatttacaccattatatttacgcaaagcctttttattaaattgcgtttcagtatactgatcaagtatttttacaacttctgcagtattaccttcttgagcacttacttttaagccatttaaaatattttgatagtcgtgtttgaaacgatgcaaatcatcttcatttttatcaagataatttgaatattcctgtaattgttccatctcagaactcaattgctgctgtttaagaatcagttccttattttctgcttcttttgcttttctatcagcatttgctagttcaagctgaaatttttgctctttttgttcttgtttagttagaaggcctttttgcactttaatgatagctatataagtaattacagagaaaactatctgaagcactaataaactcaaagacacttcaaaaactatagtcatatgtgtacttttcaatgctaaaaaatacacaatagagcttgataaataaacgtaaaatattaatccaataaaaatcgaactatttcgatcatttagtaacttacgaatttttaaataatacttttgaattataactataattacgaattccactagcaaaaatacaaaagtcatgctactagaactaatatcaaaaattaatagtattatttcagcactaattgttataagaagatctaataattcaaaaaataaaattgccccaaaaataaattttacttttttctctttttttaccaaatatgaaaaaaggaatattaaaaacgcttgaataatatctactaaaaaatcatctatttgtactacactaccagctaatacgcatgttccaataaaaactatcgaaaatgcataatcttctctcttaaacttccagcctgacaatcgataaaaaatatacaaatcaattacaggagaaaataaagcttgaaaaaacattttctattttaatccaaaaattttcttccagttaaaatgatttctatgttttttatttattgtgatatcgttaagagcaaaaaaactaactgtaggatcagcaaatccacccttaacttcaactaattccttttcattcaactttttcataattcaaatttcctttcaattaactaacaatttttacactattaatgttactacacacataatctcacaactaaagtcgtcaaattttgcaccattcaaatcatattctgcattttcatttaaaatgttcctccaccagaaccattttcccatccccgagaattactcttgaagaaatgccgtctaatttttgaccgtcctccaacaattttttctagaatcgaagtcgacaattttcgcatgatcttcctctcctttacttaaaaattattatagaaaaatcataaacctattctgtttatcaaaaatcagctcatcaaatcttgcaccattttgatcatattttgcaaaaaatgatcgatattgtacgagtactatccctccggccaaaaaagatcatccaacgttttatccagcgcctgacaaattttgatacataagttaatcgagggattataatttcccttctcaatcgcagaaattgtctgtcttgaaacatcaatctgctgcgccaaatcttcttgcgttaagtctttaccgactcgtgcagccttcatttttaaatttttcaatccttatcactttccttatcacgatggagttgaaacaggcttactactccaataatcaaccaataaatccccataatgttcagcgcactgttaaagtcatcaatatatcctagaatcaagcaaataccaagtacaacatatagccaactatttgccttaacatgctcttcattaaatgcaaaatatgctccatggactatatcgtaaactgacatcaccgttaatgacaacataataattgcaaagttaacagcaataccatgctttgtataaaaatccgtctgcatgaataaagcagaaattacttctccaacgattaacacaagaaagccatacctgtcaccacgaccacgaatcaattcctgtcgttcatcatactttgccgcacgacgatttcccacgaatacaacgactaagatgaaagtcataactgcaaacaagcttgcaaaagccattaattttaatatttcaaattttgacattttacacatccctttcttttaatagtttgatattaagcccatatttgcaaaatgtaaagtatgttttacatttttactaataaatttgtatttataaaaactagcattaacataatcggtatcatttcgtgagatttgataccgattatttgttaatgatcctgatttttcaaaaatttccttgacttcttcttttcatcgtcgtattataatgacaattaaattaataaaagcttagaagagatgagtaattacttaagacttctgcagagagtcggagttggtgcaagccgatgtagtcgatagtaacgaatatggtcttggagctattttaaagagcaagctattaagtaagcaatttacgagtgacgatcgttaccccgtccgagtattcccaattttgggagcacttagtaaggagttagttgtgaagctaacttgaatttgggtggtaacacgcttaggcgtccctagcatagaaattctatgctaagggcgctttttattttgcttatttaatttttcagaaaggagccagacaatggataaacctatcaaaactacaagttcacaaatcatcatcagtaaaaaggcattcaaccgaatgtgcactattgtctggttgatcttgatcatcatcggacttttcatcgttaaataaaacatcgaagcaaaactaaggagaaaaattatgacagaattacattacgatatcgttggtagctttttaagacctgcagaattaaaaaaggctcgcgcagaatttgaagaaggaaagattaagcaagaagaattaactcatgttgaaaataaagagatcagagaattagttcaaaaagagattgatcatggtcttaaaatcgtaactgatggtgaatttagaagaagttactggcacctcgatactttctggggctttgggggtattaaacacactaagcaggcccacggctatttcttccatgatgaagaaactcgtaacgactctgcccaagttgaaggtaaaatcaaatttactggtaaacatccagatctttcatcatttgaatacctgaaaaaagttgtcgatgaaactggcgctaacgtaattccacggcaaagtattccagctcccgcacaattttacgcagaacttgttcgtggagaagaaaatattgccgcgcttaaaaagatttatagctcagaagaagatttactcaccgatatttctaaagcataccgagacttaattttagccttatacgatgcaggatgtcgcgacattaaactcgatgactgtacttggggtatgattgtagataagcgctattggaaaagtcatttacaagatgacttttcattagacgaccttaaaagaaaatacttgaagcttaacaatgatgcaatcaaagatttgccaacagatttgcgaatatcaactcatatttgtcgcggtaactatcactcaacttgggcagcccaaggaggttatggtctagtagcggactatgtttttgctaaggaaaatgttgacgccttttatcttgaatttgacaatgatagatctggcagttttgacccaattgcacaaattcctaacgacaaacttgttgtcttaggtttagtaactagtaaaaaagcagaattagaagatccacaaaaattaatcgctagaattaaagaagctgctgaattccacccactaaatagtctcgctttaagcacacagtgtggcttcgcctcaactgaagaaggcaacacgttaaccgaaaatgaccagtggcaaaagatcaagttggttgtcgacactgccaagcaagtttggagctaaatggcaattaactagttaaaataaagataaatagatttagacaaaggagaaaaaaatcatgggaaaagttgaaagttttgaattagatcatactaaagttaaggcaccttacgttcgtttaatcactgttgaaaaaggccaaaaaggtgaccagattagcaacttcgatttgcgtttagttcaacctaataagaacgccattcctactggcggcttgcacacgattgaacaccttttagccggtcttttacgtgaccgcatcgacggctacattgactgttcaccatttggctgtcggactggcttccatcttttagtttggggcaccccatcaactactgaagttgccaaggcacttaaggagtcattagaagaaatccgtgacaacattaaatgggaagacgtaccaggaacgacaattgaatcttgtggtaattatcgcgaccactcattattctcagctaagcaatggtcaagagatattttggctgaaggcatttctgatgacccatttgaaagacatgtagttgaataaaattttgactgtataatcaaaaagctgataattcatttttacgtgaattatcagcttttattttgtcaataattatatttacttactattcattcaacttcaaatatctgctattgaaagcataaatacatattagcataataattattactggaacattcatcataattactccagcaatattaggattgcccaaatccgcttttgccaactgtggagaaaaatcttgcaaaaagtggaagattatacaccaagtcaagccattggtccaaatgtgcaaataactaaaaattaaataccctagtagtgaaactaaaatgtttagcaaccacagcaaaaactgtaacgtacgctactaagataaccgttgccataacgcgctgatttttacccaatagatttaataagactgggtaaagctgataacatagctgaagcactacttccagtatgattaatccaattactgcttttttcacattatccttattatctagttcaacttcatcagctaatgccaaataatacttatctttcataagttcacccattatttttttatatccattgttttatgaaattgaaatagtgatacaacaaaaatccagtcttgatctgtaatcaaaattggattctaaggtatcctgaacctgatcaaagcctttgtggattcgattgaaataacggtcattgtagctcattgcctgaatgccaataaaagtattaagcgactgttcagttggaaactctgctttaggcttagctttacgcttgataacgttgttaaaggattcgatcatattggtagagtaaattgaagccctgatctgcttaggatagctgtaaaagaccagcagatcaggttcaatctctttgagatttctgatgacatggttgtacgctctgttccacttgtcatagaaagcgtgcaagactttgatcgcggcttccttatttggctgttgatgaatttgcttgaattcattcatgatcgtttcgcgatcatctacgcatactttagcgcaaatattgcgcatgacatgaactagacagcgttgaaaatgagctttcggataagtctgctccagcactgtcttcatgcccacaacgccatctgaaagaaagagctaaacttgttctagaccgcgagacttcatgtcttgaagcatttccgtccaattctcgacgttttcgctgggagcaatgcggtaatcgatgacttccttgtgaccattaggcttgatgccaatggcaatatagactgcttcacgctcaaacgtttctcggcgcaaaggaatgtaggtagcgtccaaataaacgcagaagaacttgtcactgagtttgcgctgatgataggcctcgacttttggaatcatctgcttggagatgttagagacctgagctgggctgtaatgactgccatacatcttttcaatcaagtcggctatttctctagtggttacgcctttggaatatagtttgataatcatgctttccaagacattggagtgctgcttgtagtcagggagcgtgtgctgatgaaacatgccgtttcgatccctaggcacctgaatttcaatctcgccaaattgcgtatcaaccttgcgaaaataagcaccattgcgtgaattgcctgtattccagccagctctggcataaggatcatagcctaaaaacgcagtcagttcagcttctaataggtcattaactgcttgctggagttcttctttctgtatgtgtttttttgttcaaaccaatcatacgagaaaggaactcctttttctaatgttttaagaaattaatttaaggaattattcatccttacacaaactattttacagtctctagaatttaataccttagacttaatataattaaagtaattagtcttaccagtaatgattgtcacttttccttgcatcccatatcgtaaaaactctctctcagacttagttgtcttaattaaaatatcaactttaaatgcattcatgcctttctgttgtacaggatatgtacctaaactaataaccttaccattgagtattgtaagtactccctgcttatttttaacttgaaatcgaactttttgtctttcagcaagagtagctacttcatcatctggaatgtaggttactattttaagactacctttatctttaatatcgggcatagcaatactatcttcatcatctaaatgtacgataatattattttttatcagtcgttttttgttatcagccaaagtaataatagtaccctttgaaatcttttgtccttctttatatccattacttaaacttcccacactaaataagccagtaatctcttgatcttgcttggctttaggcttctatattatttttgctagttttctttaacaatttttgcatgtatttgggtaaacgattgataaagtcagccgtgaattcagctatttgtgcttcactggcatgaaagacttgctttacgctggccagcattgcatcagtaatcaattgcaaggaatggctaaaagtaatgtccgccagctcatcaatcatgcaatagaacagctcgcctagcgtgcgttcatcttcatcgtcccgcttggcaactgacataagcatgtagcgagtaaaaactatggcaacatgagcggtcaaagcatcgtaagacaggccatgatattccgtacttagttttagataacttttgcaagttttgaaaaaaacctcaatatcccaacgcttgccgtagttgcggataatttcatcttcgctaagcgacatgtcggtacaaatgattgccagccaatccttgcgattggcacggtttctaacgcagacaatccgtgcatctattttagcaccgtctttgtcctggcgtccgactttgactgggattgacagcaggtagcgagaacggccgcatcgctttttacagctgcgataaatctgtttgatgtttttgcgttctccctcaaattcatatttgattttggagctaaccttaaccatggcaatcacatccagcttcctttgcttgagctggacgatttgatgtggatttgagaaccagctgtcaaacagcacgtacttggcttgatgacctgctttcatagcttggtcgattaaattaaccatcacgtctgtgcctttagtccgggcaagcatacgtctttggccagcaatggtgcgctgatcaaaaactttattttcgccaatcatattctgtagcttctgagaagacagcagcactgaattgattggcatgaaagaagctccatcagtccagcccagggtcatcatgcgaaaacctttcttgtaagtcattgatacatggtcaaaaactttggcgactaattctgttttcttgaagccggtcctagagaagtaggaatcatcgacaacaaagcaatcagcccgtttttctgaagtcaaagatcgcaagtggttattaatgatttgcgcagacagacgtgtggtgaagtggagccaattgacgtgaacgttgcgcataaaacggtaatatgagttcttggaaaaattttcttgaaaatgatccattttcagctgcatatataagctgcggtcacgaaagacattgcttaaaacgtaaagaaacaagctgaacaggctaatgcctttttccttgcggaagccacattttctcaacagcttgatcacctgaaacttcttgatgaagctgatgattgagtttgaaaatagttgttcattttgttggtcaggagatggtaaaatagacattggcacaagcctttcatgcaaataaattatgttttggtcaatataattatagcaatgaaaaggacttgtgccttttatatttgtcaaaacacgcagaatcacaatgaaacaagcaattttgcgtgtgggaagtttaagtccattattttttaaagaaactatatggtctggttcaacaacacctatactattaatcacattttcatgcacagcaaaaaaagaaccaataaacaacaaaattactaaaataaaagccggtaaaattatcatcgttgaaaagttatgaaacttatatgaataaaacttactactttctaaatattgatcattcatttaatatcacctaactttttaccaaatcataataataaccgtgcttggccattaattcagtatgattgccttgttctacaattcgaccttggtttaataccacaatattgtctgttctttcagcaatagctaaacgatgagcaataaatattacagtcttatccttcagacttattaaattatcaactacttttttctctgtaattgtatccagcccacttgttgcttcatcaaaaattaacaccttagcaggtgaaagaagtgctctagcaattgtcagtctttgtttttgtccccccgataaaatttttgcattctcatctaattgagtatcaaatcctaaaggtagcttctcaatatcattttttatttctgcaatttgacatgcttcggctatatcttcttctgttatattagaacgacttcctaataaaagattttctttaatagtgcccgcaaagacataaggagtttgtggaacataatttacatatgaacgtagaacgtgcttatttatctctttagttgaataattattaaaagttactttaccttttatcggactaaaaaaatcaaccaataacttaaccaaagttgatttaccgagactgtaaaatagtttgtgtaaggatgaatgattccttaaatttatttctttaaacattagaaaaaggagttcctttctcgtatgattggtttgaacaaaaaaacacatacagaaagaagaactccttcatgaatgattttaccaaagattttgctcaagctctattcaatccagacaaaagtaagtgtcaatgtttttgcggtagcctttaaaccattagtctaaccttaatttcttaaatatttatatgacttaaatttctgcttagcttgcttaaataactattgccagctacctgtgcggttaatgcgccatgctggatgcctaaatgaacttcatgacgcttctttaagctgtcacgggccgctgcttttaattcctgttcagtcaatacagttatttctgaatcttcaaactcgctgctaagccaaaatgccagctctcgattcttgatgcagcttaagatcctaagcatgccttctgctccagattttgaccatttcttgctttgccccttaacacggtaggtatacttgcggtggttgctctcgcagcagccaatggctttagtcacagtcagttttcgtttcttaaacggcttaatatcgtcccaatgacgatcaatataattccttaggcgccccagataatcatgattgagctcggtattcaattcatcaattagtcggctttctgcagtggttaggatagttttaactttgtcatagctgtatttgtattccaaagcagaaatcagcttgccttgcaggtcaggcgcaaaatatagcctttctttgattttcttatttaggtgaaagacatccaagaaatgctcatgacgcttgcatagccctacaatgtcatcgaagtctgttttggcatatccagcaccgccatcggcgttgctaagaattacagtatcagaaagatcataagtattggccaggtactccttggcttcgttcagcgcatcaagtcggcttaaagaaacaaattccttggcattgattcgctttctgcgtttcttgcttatattgacaatgccttcacagacctgatagcgatgaaattccaaccggcttttagtgcctttgatcaccacgccatcgccttcaagatacaaaactgggacctttttcttagtgcctgcggcatcatatcttgaatctgcttcttggcccgctttaatatttttcccggccatttttaccaaattgcccacctgcatatggctaatattaaagccagacaggcaattgactgctagagcagtattgcgataagtggcaacgctgcttacttctaagatgtttttgactgctaaaatactgtagcgcttgtatttgtcaaagcccattaattcatccaagggataccttgcttgtttgcctgggcagacatatcttcttctgacatacctaacttcgccaaaagccatattgattgagcgctcattcttcttatcaatctgatagccctgtgctttaaccttggtaatcatttcatcatcaactttagctaaagccaaggccatgatttccttaatcaggtttaagaagaaacagattatttttctttcacgcttaatataattatcttcagactttataatatttgcgatttcagttacaattgaattcataaaagaccagcttctaatgtgttttttgttcttaacatcagactactggtctttttgtttgagctcaagtccaaattcaaaggacttgggcttttttaattatttattcaacttaccgtaaaaaattatacacttagcagacaaaataaatgatttattgcgcaaagagctacaacaggctgttaataacttgttagaagctgaattgactgcctttctgggctatgatccctatgccagaaatggctggaatactggcaactctagaaatggtgcttatttccgcaaagttgatacgcaatttggcccaattgaagtgcaagtgcctcgggatcgcaacggtcaatttcatcagcacacgctgcctgactacaagcagcactcggatatcttggaaagcatgattatcaagctttactccaagggcgtgaccaccagggaaatagccgatctaattgaaaagatgtatggcagccattacagtccagctcaggtatcaaatatttccaagcagatgattccaaaggttgaggcttaccacaaacgcaagctaagcgacaagtttttctgcgtctatttggatgcgacataccttcctttgcgccgagaaacatttgagcgtgaagcagtctatattgccattggcatcaagcctaatgggcacaaggaggtcattgactactgcattgcacctagcgagaacattgaagtctggacagatatgcttcaaaacatgaaatcccgaggcttaaagcaagttgagctttttctttctgatggtgttgttggcatgaaaacagccttggccaggacttatcctaaagctcattttcaacgctgtttggttcatgtcatgcgcaatatctgcgctaaagtacgcgtcgacgatcgtgaaaagatcatgaacgaattcaaacaggtgcatcaacagacaaacaaagaagaagccacagctgtcctgcatgacttctataccaaatggggcaaggtttacagccatgttatcagaagcttgaaagacatagaaccagatctgctggtcttttataactatcccaagcagatcagagcttcaatttattcgactaacatgattgaatcatttaacaatgtgatcaagcgcaaagctaagcctaaggcagagtttccaactgaacagtcgcttgatgcttttattggcattcaggcaatgagctacaatgaccgttatttcaatcgaattcataaaggctttggtcaggttcaggacaccttagaatcctactttgattaaataaataattaaaaaatcaatttacgagaaagatctatttacacaaaagatttgacagtttcgataaagttgtaaatgtaccattaggaatataagtgtcaattaatccttgtacaaaatacgaactgcaaatactaatcaacgtcatcaataaagcagctactatgatatttctaaccaactttttctgtttaaacatataaggaaaaagagacaacagattattctttttttcttttacaggcttaaagtctgctttagggaccatgaataaagtaatcccagtccattctttttcaaatgcctttttagacatttttttaattccactggtagaatctggatcagcaacaattatctttcttttggtacttttaagaactacgtaataatgcaatagtcctccatcttttattacatgaacaataaaagggtattgaatatcactcatgtaaaataaggacatatctgctttaactgcttgaacattcatatcaaatttttcagcagttttaactaaacctagcgcagtagttccctcagtatttgttttagcaatatgacgcaaatgtgctatggatactcgagaatgatagttctttaagatcattgctaagcatgcagcaccacaatctgtttcatcaatttgtgggacatagattgatttgtacctaagcgaaattaccattttcttcttccttcttagccaatatctcagttttataattatattcagatagtaagtctttcatcttttgcacactagtacgtgaaaaatcctcaacatctccattaataaactgtacacgatgttgcttcaaatcaatcgattcaatattcttaggatttactaagcatgactgatttattttctctagcattggattttctttagcatattgattaatactacctaggagttgcatttctcctgttgttagaatcatcaataatttatgtggagtaactgttgttgaaatataaataatatcatcaatattaacgtttctagtttgtcgaccaatcttatatgaaaaagtcatcttcttcatatagttgaacttatgcaaattataaatggctacttcaattgtcttcaccatcgtgtgtctaagcttatctaaatcagatgtttttacaatataatcgattggaccaagacgtcttctaaatgtaattaaagataaatcagcatgactagtaacaaaaataatctgtgcacgttcatctcgcttcttaattaatgaggcaagatcaaagccggtatcattttcagtgtcaccacctaagtcaacatctaagaaataaataccaccatctaatttatgctccttcaaataagtaatagcatccatataattagtggctgtggcaatcgaaaattctacttcttcatcatctgagagaatcatctcggctgcaccaagaatttttttagtttgctcaatctgattctgatcatcatcacaaataaaaactggatatttcatttttagtcctcaatttcattttcatcatcaggcaaaattgttaaatcaaaagtaaaccaaccatcatcaacgtaataattgacaatcattacatcctcatatttatgagtaatttcttttacattggctaatcccaatcccatatgatgctttttagtggtaaagttcttttgactcattttatctgttgctatagtagcttctctaactcgattacggatttcaaattcaaaatcaccattttcttgataatacattgcatcaactcgagcattattagtactatctgtttctttgattaatgccatactttcctcagctgcattatcaaatgcaataccgataattctaactaagtccaaaatattaacgctcttaggaatttgagagatgttctgttcacaatcaaaactataatttaaatccaaactatataacttaaacagtttagcaattgcaatactttttaaatttttctcatggatatgatttacgcctttatattttcgaagagctttctgatcaaactgcgtattagtatattgatcgagtatctttacaactttcgtagtgtcgccctcttgagcactaacctttaagctatttaaaatattttgatagtcatgtttaaagcgacgtagatcatcttcattcttatcaagataacttgaatattcttgcaattgccgcatttcagactttaatttctgctgtttaagaacaagttctctattctctacttcttttgcttttctatctgcatttgctaattcaagttgtagcttttgttccttttgctcttgctcggttaaaagtttcttttgaatattaactaccgtcgaataagcaaatatggagaaaattatctgaagtattagtaaacttaaagatacttcaaataatgtcgtcatacgattaattttaactgtgaaaaaatagactatcattgtagaaatataaatatatgtagtcaactctacaaaaattagtccatttttattcattaataagttgtaaatatgacttttgttcataactatcagtagggcaaaaattattccaagaataagtgatagcaaataaacatcattactaaaaaagctaagtctggatccgaaaatagtcataattattgagcaaaataaatcaattaatccaaaaataagtgcagctccccaaaaaagctgaaactgtcaaatcttttgtgtaaatagatctttctcgtaaattgattttttaattatttatttaatcaaagtaggattctaaggtgtcctgaacctgaccaaagcctttatgaattcgattgaaataacggtcattgtagctcattgcctgaatgccaataaaagcatcaagcgactgttcagttggaaactatgccttaggcttagctttgcgcttgatcacattgttaaatgattcaatcatgttagtcgaataaattgaagctctgatctgcttgggatagttataaaagaccagcagatctggttctatgtctttcaagcttctgataacatggctgtaaaccttgccccatttggtatagaagtcatgcaggacagctgtggcttcttctttgtttgtctgttgatgcacctgtttgaattcgttcatgatcttttcacgatcgtcgacgcgtactttagcgcagatattgcgcatgacatgaaccaaacagcgttgaaaatgagctttaggataagtcctggccaaggctgttttcatgccaacaacaccatcagaaagaaaaagctcaacttgctttaagcctcgggatttcatgttttgaagcatatctgtccagacttcaatgttctcgctaggtgcaatgcagtagtcaatgacctccttgtgcccattaggcttgatgccaatggcaatatagactgcttcacgctcaaatgtttctcggcgcaaaggaaggtatgtcgcatccaaatagacgcagaaaaacttgtcgcttagcttgagtttgtggtaagcctcaacctttggaatcatctgcttggaaatatttgatacctgagctggactgtaatggctgccatacatcttttcaattagatcggctatttccctggtggtcacgcccttggagtaaagcttgataatcatgctttccaagatatccgagtgctgcttgtagtcaggcagcgtgtgctgatgaaattgaccgttgcgatcccgaggcacttgcacttcaattgggccaaattgcgtatcaactttgcggaaataagcaccatttctagagttgccagtattccagccatttctggcatagggatcatagcccagaaaggcagtcaattcagcttctaacaagttattaacagcctgttgtagctctttgcgcaataaatcatttattttgtctggattgaatagagcttgagcaaaatctttggtaaaatcattcatgaaggagttcttctttctgtatgtgtttttttgttcaaaccaatcatacgagaaaggaactcctttttctaatgtttaaagaaataaatttaaggaatcattcatccttacacaaactattttacagtctcaaaaagcttgttagctttactctttctacttattttgaaataaaagaaaatacttaagatttccaacaaatctgacacaaattcatttatatatccacttgcatcccctaaggataaggctacaaataaaatgataagaaaaatatccgcatatttatatttttgtcttgcaacttgataaaagatccataaatcaaataaaggtgatacaacagcttgtgttaataaaagccacattagaacttcctactttagatgtaacatccacttaattaaattgtgtctatgcttacttgtaaagttagtaacacataaaaaactaacagtaggatcagcaaatccacccttaacttcaactaattctttttcatttaacttcttcacttaaacttcccacacgcaaaattgcttgtttcattgtgattctgcgtgttttgacaaatataaaaggcacaagtccttttcattgctataattatattgaccaaaacataatttatttgcatgaaaggcttgtgccaatgtctattttaccatctcctgaccaacaaaatgaacaactattttcaaactcaatcatcagcttcatcaagaagtttcaggtgatcaagctgttgagaaaatgtggcttccgcaaggaaaaaggcattagcctgttcagcttgtttctttacgttttaagcaatgtctttcgtgaccgcagcttatatatgcagctgaaaatggatcattttcaagaaaatttttccaagaactcatattaccgttttatgcgcaacgttcacgtcaattggctccacttcaccacacttctgtctgcgcaaatcattaataaccacttgcgatctttgacttcagaaaaacgggctgattgctttgttgtcgatgattcctacttctctaggaccggcttcaagaaaacagaattagtcgccaaagtttttgaccatgtatcaatgacttacaagaaaggttttcgcatgatgaccctgggctggactgatggagcttctttcatgccaatcaattcagtgctgctgtcttctcagaagctacagaatatgattggcgaaaataaagtttttgatcagtgcaccattgctggccaaagacgtatgcttgcccggactaaaggcacagacgtgatggttaatttaatcgaccaagctatgaaagcaggtcatcaagccaagtacgtgctgtttgacagctggttctcaaatccacatcaaatcgtccagctcaagcaaaggaagctggatgtgattgccatggttaaggttagctccaaaatcaaatatgaatttgagggagaacgcaaaaacatcaaacagatttatcgcagctgtaaaaagcgatgcggccgttctcgctacctgctgtcaatcccagtcaaagtcggacgccaggacaaagacggtgctaaaatagatgcacggattgtctgcgttagaaaccgtgccaatcgcaaggattggctggcaatcatttgtaccgacatgtcgcttagcgaagatgaaattatccgcaactacggcaagcgttgggatattgaagtttttttcaaaacttgcaaaagttatctaaaactaagtacggaatatcatggcctgtcttacgatgctttgaccgctcatgttgccatagtttttactcgctacatgcttatgtcagttgccaagcgggacgatgaagatgaacgcacgctaggcgagctgttctattgcatgattgatgagctggcggacattacttttagccattccttgcaattgattactgatgcaatgctggccagcgtaaagcaagtctttcatgccagtgaagcacaaatagctgaattcacggctgactttatcaatcgtttacccaaatacatgcaaaaattgttaaagaaaactagcaaaaataatatagaagcctaaagccaagcaagatcaagagattactggcttatttagtgtgggaagtttaagttcttcataattcaaatcttcctttcaactctttaactttttacatcaccaatattactatgcattcaattttatacacaaagtcgtcatattctgtactattttaatcatattctgcatttttatttaaaaagcacctccaccagaaccatttccataaccatacgaattatttttaaagacgcggcgtctaatttttgatcttccaccaacaactttcttcaagactagaatagatagtttttgcataatttttcctctctttttctcaaaaaatactatagaaaaacatacacccatttggactccaaaaaacatttcatcatattctgcctcatttcaatcatattttgcaaaacatcaagttactcaatatgagacgcttctttcaattttatttaaaagatcactacttcgagtcctccatcttttcggtatcattttagctcatttgataccgctaaattaataatgataccgattaaatactaaaaaagactgacaattcatttttacgtggattatcagcctttttgattactcatgataaatatcttgaaccgccataccccaatatggaatatattccatacgcgtggtgctagttaaatcgttttagttaataactgaaaattgaaagcaccaaaatcaagctcaagtcctgtcactattgagctttcttagacgtaattagtttttatatgatctgtttcagtgcaatttgtatgaatcgtggcagttggttaataaagtcattgattacttcatctatcttttcaaaactattctgtttaagctcttttaattctgaaattaagtagaccaatgcatctacgaatctaatatcaggtaaggattcgttcattagatagaataaatctccgattgtcttatcatctgtattttgtctttcctgccaggtcaatagatcataagttattgctgtaactgcgatatagccacattggccatcatagctttgaacttgagatttatctaaagcaagatattgcttagacgtcttaaaatatgtttcaatttgccatctacgaccataaagttggatgatttcttcagggctaagctttgtctgagtagtagctaaaaccaaatacttgttcttgtttccacggttggagacaaagacgagctttaataaaaagctatgtccatgatattgagcctcaactatgcttgaataaagataatgtttctttttacggatgtttgaagcagccaaacgatcatacaagtctttaacgctatagcggcgatggcgataaatgtaataaatctttgaactcttcttgatcatgccaagtccatctaaaccgatcttctttaaaatccaaaacattcttggagaagaaaaccaagaatcgaataagacgtatttagcttctactcctaatcgtaaggcttgtctaatcaactctacagttacatcattcatctttctctgagcttgatttctccttttaccagaaattgaacgttcatcagcagtaatgggagcagctccaatcatatttttcttggttttggttgacatcaaggcaaagttaaccggcaagaaggtattgccatcgctccagcctaaagttaaaccacgatatccgttcaaatactcatgcttgtcatggtcatagactttagctagcaattcggtctttttagaaaaagaccgagccatcagcgtatcgtcaacgataaaagcaagtcggcgtcttttatcgataaatggttttaagcagccaatgagccgggctgcaatcaagcataatagtttttgccagttgattcttccatcgttaagtacattgcgagcagttctaacggaaaaacgtttgtcatccttagctctgaataaagaaagccgagcaaaatgtactgacatcagccaagagataatcatggttaatgaaacggtggatttacgcttaaaattgacttgtttagttaacttagctagaccaattagattaataaatgaagaaattaaggatttagtatcattttctgtgtcgatttgttctatactgttcattgcgcaggatctcctttactttttaggtcgacacttaaagtataacgcagagagagcctgcgtttttatttttgataagaaaaagccaagaggcgcggggaaggagcgttaatcttagctttcaagtttcagttaataaaaaagtccaatcttgttagactcgacttgtaaatagtaataatagaaaagagtctgatctgattgaactgccttaagcttaagcgttttagccaccatttacaagttagttttaaagatttagtgataatttgtcggcactggtatcgtttgtatgcaccggctgagtttactcatcggcgaaatattgatcaaattaaaactacggacagtctgattttggctttacttatctggcaagctaagacaggaattgaatcacaaagaagattctgtgaatgtttcaattgtttatcacactcacgttttaatcgacgttcacgtcagctattgcaattgatttatcagatacggcaagaaatgaataaaaaggttgacctgaatggacatttcttgatcattgacagctttccggtacctgtttgccaaccaattcgcaactatcgtgctaaaatttttcgcggttatgccaacattggttataaggccaccaagaaaatttacttctatggtttcaaagttcatgccattgttagcgatgacggttacattcttgattatgtcgtaacaaaggcatcagttcatgatgccagggagacagttgaactgctggaaaatgcacatccatctaattactatcttcttggcgacgaaggctatttaggcaaagaactgcatcaacagctaaaacaaatgggttatgaactttggacaccatatcgtaaaaatatgacaggagctaaaaagcacaatgatcatcaattgatggctattcgcagaacaattgaaagcgacttttcgcttctgacctattacaatgccgagaacaatcgagcacgtagtctgataggctttcaaagccggttggaaattgcaattttagcttataatttggcttattgtctagaacgatttaactagcaccacgcgtattccatatatcttttacttgcattcttatcatatggttttattaaatacgcttctaaacttgatgcaattgccttagatacttgagaagcatctttatctgataaattaaatgttttacgaattgaagagttactaatcttcatgtcatttacatatttcaaactagcatcccagtaaattgattcattcttttcagtaatagccaattcactaaatgctttttcctcacgaatagttacttgcgtagcagtggtacccttgcttaaaatttcgaccgttggtaaatgagcctcttctaatgaataaaccactttatcaattccagtaccacgtgattcagtaatatgaaatttacttaagatattagccaattcaggattacgggatcgaggtgggacgtctaaaaatctaagtggttcaatcaaaggaattcctggtgctgtgcttgctggtagtattgatttatcatgtttgaattttttaagacaccattatatacaaatttccagcaccaaaatcagaagatgtcgtcactgctatcttatgccagctaacattgccattcattggttgaggaacttggctctgtatcacctcagaaaaatccttaatttgatgtagattcaactcatttttacgtgaattatcagcttttatttatatctaaatcattcctgcaattaaaccaactacatataagaagacacagcaaactactaaatacaaaccgccccacttcacggtctctttcagtatttcgccttcatcaccttcgcggttaattgaaccagttgccacggcaatattttgcggcgacagcatccctgccgttgcgccagtcatgttcgatgctacaacccagtacttacttacacctaggtccattgcagccgacagttgtaaatttccaaagagaacgttagctgaagtggcagaaccagttaagaatgttcctaatgccccaataagtggtgcaaataatggataagctggccctaataagctaactaaggccactgctaatgcatcggtcattcctgcatagaccattactttggctaatcctacaattgcacaaaccgtaattgttgtcttccagacgctcttaattacttgtcctaaaatttgcatcattttcttaaaactaacgccctgaattgccccaccgattaaagtagcgacaaaaagcaatgtacctggagacgacaaccagctaattgacaaggtattcggatttttccccgtataaacaaccaaattagttgtcaccttattaagtaaattattaactgctggcaccaatgatgatgcaaaaataacgaagatgaaaactaagataaatggtgaacatgccttgagcatttctttagtacttggtttttctacatcaggttcttcttcctcatcatgccatctagttaataaaatcgtaattgcgattgaacaaagtgccccaacgattgctggcaattctgctccaacaaacttagccgcaattacttgcgggattgccatgcctaaacctgacatcaaggtaattagtccaacgcctttaattgctttaatagaaccttccgttaaaattactaggataaatggcaccagcacaactaaaacaaataattgcaaggtcacgatgaaggataattcttcttgctttaacccagtcacttcacccaaggtaatgatcggcaagccaattgcaccaaaagctgtggccgtggtattagcaatcagactgattactgatgctctaattggctccaagccaaaggcaatcaaaatcccagcggcaatcgccaccgcggttccaaaaccagcaattgattccaaaaagccaccaaagccccaagcgataatcaaaacaataatccgcttgtctgttgaaatcgtcgccagcatatcttgaatggtcttcataccacctgattcggtagtaacattatacgcaaataaggccatcacaattacgaacatgatcggccaaatgcccatgataattccttctagcgccccacttgccgtatctagcaccggtaatttaaaactaaagactgctaacaccatcgtcaaaattaagccaatgacacaagcgcgtgcagctggcattcgcataactcccagcgaaataatcaaccaaacgatcggcaacaatgcgatcgcaaatctaatccacatcaaagtcctccatcatcaaaagtgttgtactatattatttaatcatgatttgggtaaaaagttaaaataagacacaaaattttagttaaaattacaattttcacaaatttcacttgcaagttttaacaacaaactatataacaattaatggaaagtaaaatttctcacatcatgtttgaactactccgtggaatagagtagttctttttttgcgtaaaaaaatagccagaccgaattcagcccaatgtcattaagttaagacattgacaaattatcgacttggacttttaagatcattcatttgcgatttatcgcatttgaatgctcttttttcatgccaaataaacccaaatcttgtttagaaattaggctacacgatataaataatatacagctgatttgggtttgagatttcttttgtcttttcgtcctggtctgatcggaattgtgtaatgactaatttgaataagaatctttttaaagatttcagttgaagaagaaattatatacatagcctggatgacaaaacatgactgtttgaaattgatcgcatattgatacttgcatttttttgtggtacatatgcttgagcatcaatttgactgactgcgttaaacataatcatgtgggcatagatctccatttcaataaatctatcctgcttggaatgaaactgtacgctacctaaagcatatttcaactttttgaatgaagtttcaatgccccagcgcaaatggtagatttctttgatcctttttaagggataatcggctctatttagattagttagaacaactttccattcttctttgcctgatttaggatcattaattctaaatttacaggcacgaaattttattgtacataactctccaaagtcccagctgccatctttggtatttttagaccgatattttatatattgacggtaatgatggttaaccaaatgaacgttttctgtagccttatgggtttcataataataattagaggtagtcacccagcaagctatatccttatcacactcttgattaggcaactcagctacttccttaaatgcgccatatcccgttttagtacgtatgacataataacagttaggcaggcgattacaattttcaatcatgttaaagccggtataacctcgatccatagtaactatatatggtccgcaatttagctttttaagcatttgaacggcggctttacgttcatccatctttgacttaggctgaaagatgcagtcttgataagtattatttaacaggtcatagagtgcattaacatgaatttggcaatatggctttcctttatgattgagatttccaacgatattctctgatttaggattccagatttgattaaaatcagacccatcaatggcaaatatacgatatttatgatcaaataactggatattaaataaattctgattaaatacagttagaatatgcttaaaacatgcgggtgaaagctgacctttgcgttggacataagcggaagtactgactactttatcgttatttttaatagctttttggccaaaagctctaaacaactcactggtcaaatcttttccttgcatattaatagtagttttaatgactgtagctgcatctaaaaaccgcttcctagtgaaggcatgaggatcatcgataaaatcatgaatatgctttccagtatcattgataatttgatcaagacgatctaaaatatttctgtgaagggctttcataattaacaccagctttctggcaataattttgaaggtttaataatttaatcagagggcgaaaaggtaggttcttttcgcctttattttatgcaaaaaaagaaccaaatcataatgattcggttctacagagattagattcaatttgtcaatgtcttaacttaatgacattggaattcagcctgacttctgtttttttagcgatgtttaattacgtgaataccataagcgattaagtaaattaccacttcgatcgttgcaataaagaaagttaccggccagttggtgataaagccgagatacagtccagcccacacgccaactaaagcgaaaaacacggaccaactgatcattgctggtattgttttaccaatatagcgcgccgttgaagatggcaatgttaatagaatgaagactagcaatgaaccaacaatctgggcaccgatagcaactgacatagccaaggctaccaagaaagcaataccaacccagccagtatgtacaccatgtgcaacggcaccgatatggtcaaatgagtcaaaattcaagcttcgagctaccaaaataattaatagtaaaactagaattgacaaaaccactagctgaatcacgccttgtttatcaacaccgatgatactaccaaacagaatattagtagcgtaacggctatttgatccagaaatggctaagaacagcacacctagcccaataaacagagctgagatcgcactaactgacgattctttttgatcgctgtgcaaggacaattctcctactccaattgaaccgagcaaggtaaatagtagcatcccccataacggtgcaatgccgataaagacggcaaaagctgctccagcaaagccgatttctgacagtgtgtgagctaaaaaagcataactccgtgctactacatatacaccgaccacgccacaggtaatcgcaatgaatgtactagctaagaaggcataacgcataaattcgtattgaaacattattcgaaatcctccttaaatttatccatctttccttgcctgatcgttcccttatttaaatatagataatcagtcatatactttttagctaaaggaatatcatgagtgacaaacaaaacggtaattttgtgttcacgattcaggtgcttgattaatcccatcaattcttccttagcagccggatctaggctagctgttgcttcatctaagatgatcatattgggatgatcaagtagagcctgcgctaaatatgcacgttgtttttgtccacctgatgcctcacccattcgggtattctgaatcttttctaaatgagtttcttctaactgatgatcaatctgttccttaacctttttggtcttaaacaatggggcgttaagtccaataaatgcgcgaatcgacaatggatactccgcatcaatatttctaaactggggtacataacctaacttaacgtctgaatcaaacttaaagttgcccgcagtcggctttaacatccccattaaaatcttaattaaggtggtcttccctgttccattaggtccaagtagtgcagtcattgacccgtcttcaagctgaaaactcaaatcttgaaaaacatctttagtatcaaatctcatcgagagatcatttacttctaaaatcactcttctaccccctccctaagttgctattatttttctattttagccaaattttgataattttctttcatccaagccaagtaagtagtgtggttaggaatagtctcccgcacatttaacactggaatattattttccttagctaattttacaaataacttcacagttgaactgcttgcctgtgtattgttaacaaagaatgcaatcttttttgctttaatttcattattcatttgattaatcatcttaggactcggatcagtaccattctcaattgcttcttcaaagcccttatccccaatcttgtatcctgcttctcttaaagcataatcaaagacaggttcactaacaaagactggcttactatttttcttattagtcttcaccaattgcttaacttgattaatcttagctaaatacttgtcaccattagctttaaaataagctgcatgctttttatcaagcttagataaacgcttaactaggtaattaacatacttggttggcatacttagattgtaccaaatatgcggattatcccccttctttaatcccatcaagtcttcaccaactaagacaggctttttgctaacagaactagctagcttattcatccaagaatcatagcctaagccattagcaacaataatatttgccttggtcaattctttagcatctgccgtagttggttcaaaatcatgaggatcggtactgctattgctaatgattgccttagccgtaccatattttcctacaacatttttagcaatatctgcataaacattggtggtggtaatgatcgagactttacccgaattgctcgtcgaatttgatctattcgagcaagctgaaactaacagcgcaataacgccaattagtcccaaaaaagagattaacttcgtaattttagatttcgcattttgcataaaatatcctccttgtgcaaaataaaaaagcatttaagttagaaaattcagcataaattctaactaaaagttagaataatctagttaattacatatgtcaacatatttttgcatagacaaatagcaccagtctcccataagcctgatgctatcaataatttaagtcataaaattttgctgaattttattaaatgctttgttctaaaattacattattatataaacatatttttatataattgtcaaactaaattaaaattcttccttcacgtgctgacgcaaaacatctaagattttaatcacatgcttatcttctaagctataatagcgctcctgcctaacccgctcgctcttaactagcttagcctcttccaaaatacgcaagtgacgcgaaatagctggctgactaacatcaaactgcttaactaaattattaacactacttttttgattatcatttaaataatataggatttgaattcgaatcggatgattcaacgctctagtaatccgaataatttgctcgtccaatttcttcacccattcatactttttaatttattatagcttaaatttaggtataaaaaaacgctacccttcgggtagcgcaaaacataacagagtatcttgatttaagtagagatcatcaagatatttatattataatacgtttttgccaaaatgtattgttttttgattaataaccagaattatttaataataatattcgatattacttatagtattattcgtttgggtcttctttgacattcttcttccagaaactcatgattaaaccagcaacgattgaaccaataatagtagctaggaagtagaataagatgtggcttggaccaccgatgttaccagcaagtggtgatacccaaagaccaccgtgaggagctgggacaccaacgtgccataaaccaactaaagcaccaccaacagctgaaccaatgatacatgatggaattacacgacctgggtcagcagcagcaaatggaatagcaccttcagtaatgaatgagaagcctaatacccagttagaaacacccgcacgacgttcttctacagtgtacttgttcttgaagaatgcagtaccaattgcagtagcaaatggtggaaccataccacccaccattacagcagccatcaagatagcagcagtagctgagtgaggggcgttagcaaatgcacctgaagcgaagacataagcagccttgttgaaaggaccacccatatcgattgacatcattccggcaaggatagtggtcaaaagtaccaagttaacagtacccattccgttcaagaaatgagtaatagcaaagttaatgccactaaagattgggttaatgatgtagaacataattgctgcaataaagagcaatcctaaaattggatagaacagcattggcttcatgccttcaacagaacgaggtaatttagcaaataatttcttcaaaccaaccatcaagtaaccagcaataaaaccagcagcaataccgcctaagaagccggctggtgaagttgcgtgagcttgaacgttaacttggaattgaccgttaacaatagaggccatgtaaccaccaacaaaacctggcattaaggctggcaaatcaccgattgattcagcgatataggctgccaaaactggaaccatgaaggcaaatgccaagttaccagcattgtttaaaaagatgaaagcaggagtcttagcgccacccatgtagttttctacgatgaatgagatggccattaagataccaccaccaataacgaatggaagcatgtgactaataccattcatcaagttcttgtagatacctgcccacaaacctggcttctcagttgatgaagattcagttgacttgtcttgagcacttgcacggtaaacatcagccttaccacccataatgtcatcaatcaattcgcctggcttgttaattccatcaacaacaggacggttaactaagtgcttgccgtcaaaacgtggcatatcaactttcttatcagaagcgataataacacctttagcacgcttgatttcatcaggagtcaacttatccttaaccccttctgaaccgttagtttcaattctaacttcgatgccgcgcttcttaccttccttaatcaaggcttcttgagccatgtaagtgtgggcaataccgttaatacatgcagtaacaccaacaatcaatggcttgttgtcgtcatcacttgtaccttgagccttagcagcttccttagccttcttagcttcagctgccttcttgtcttcttcgtcttttttagcttcagccttttcaaaaagatcgataacttcttcaggagtcttagtattcttcaaagcttcaactaaatcaggatcaattaacaaacctgaaagttttgctaatgcttgaaggtgagtattgtcagcaccatctggtgcagtaatcatgaagaataagtgaactggttgaccatcaagtgaattatagtcaattccttccttactcttggcgaataatacgcgtgccttgttaatagatttgttacgtgcgtgaggcatcgcaattccgccaccaataccagtagttgattcgttttcacgtgcccagattgacttaataaaagcatcttcgtcgttaacgatatcagttgctacttcaaggtcagccatttctttaatggcatcttctttgttcttagccttaagctccataatcatggagtcagggcttaaaatatccttgattctcatatttttcccctcgttttttattaagaaatttgctcaactttgatttgtggaagaacagcatcaatttggctcttaactgcaatgtccttagtaaaggcagtagcagcaccacaagccattccaattctgaagccttccttaggatcttgggtcttgtagtaagtaccaacgaagccggcaatcattgaatcacctgcaccaactgagttaacagcagtaccaacagcacccttagcatggtaaacatgatccttggtaagaaggaaaccaccttcaccagccatagaaaccatcacattttgagcacccttatctaaaagcttttgtgcgtattcaagcatcacatcacttgaatcaaaagttacgccaaacaagtctgctaattcatggtggttaggcttaattactagtggcttatatgccaaagtatcaagtaaagcttgtccagtagtatcaacaacaaattctgcacctgcttctttaatagtaggaagcaatgattgatagaaatcagttggaaggcttggagtaagagaaccgctcattactacaatgtcgcccttctttaaatcgtttaaacgatccttaaaagcagtgatttcttggtcggtaatgttaggaccagccgcgttaatttcagtttccttttcagcgtggatcttaacattcacacgagtgttatctgaaatagtaacgaaatcactttcaattctcttttgattcaattgacgaaccaattccttaccagtgaagccacctacgaagccccatgccgtattatcaacatttaattggttaaggatttgagaaacgttaattcccttaccccctgctaaaaatgaatcattgttagttctgttaacttctccgcggttaactttttctaattgaagaacatagtcaagcgctggattaacagttactgtataaatcatcctattttgcctcctctaattcaataccgactggtaatgaccgtttttgacctggttttagttgatcagttaccacaatcacgtcacttgtattggcaaacacagcaaagttacgctcaccgattttactattatcagttaatacataagcgtgtcttgcctgtttgatttcggctgccttaaccgcagcttcctctggatcaggtgtagttagattgccatttttttcaattccattagcaccaacgaagctagctgaaaaattcattgccttaatctgacttaaggcggtctgacctataacagcatgcgtatcgtccttaacttcaccgccaattagaattgtgttaattccgtgatttaaactgcataaagcagtctctacaccattagtaataatcttgacgttagcaacctctgctaaaaatggtaccatctcataagttgttgttcctgcatcaatgaagacattgtcacctggacgaacaaaattctgcacggcatatctagcaatagtgatttttgcgtcatgattcaaactgaagcgaacgttttgtgatacatcacgagaaaaatgtttaactgattgggcaccgccatgaacacgcttaaggatcccatttttttccatctgaattagatctcgacggatagttgattcagatgttgcggttaagtcacataattcacttacgcgacataactcgtgttgattaacatagtcttcgattaagctttggcgctcctgagtcagcatcatttctcacctcgataaatattgtattcgctttctcctccaaaatcaatcatttttcttcaaaaaatgtcatttttatttattatcgttcaataacattcatttatatgcaaaaaagatgccgttttttgattgaaacgacatcttttcttcgtcatttggaattattcttagtcgttttaccctatttgactaagaatccgtaaagatgactaagaaagagaaccaaagatctattaaccttgcaaaagcaaaacacgctgaatcattattgattcagcgcgttttactattaaatatattttgtctagcctctcaagctacgcttaaagttttgccatgggccgacatcatctgtttgcaaaatcaagtttggatagatttttctaatccagataaatgacgctactgtagcggctaaagcaattaaagcagagatagctgcctctaaattagttgcgttacccataattactctagctggcattacaaatgatgatagaaacgggatgtacgataatactttagcaaaaatcgtatccccacctgattgcatattgactgtgaacaagaacccgatcaacatcaatgtagatagtggtcccaccgctttgttggcattctcgcttttagcaaccaaagcgccacagaaagctgcaaagataataaacaataccaagccgattatcgtaaacaccaatccccaagaagccagattgccaattgcttgatcaatcatcggcttatactgtctaaataaatcgctaaagccatcgatgtatggggccgcgcaataaactgccacaaaaccaacaacataaattaacacttgggtgataatttcaccaaaaatacctaaaatcttcccagtgaaataatcgccacctggcatactcgaaaagattacttccattatcttggtacccttctccgtagcgatatcttgtgctgttacttgcgtataagtgatcacaagcatgtacaagataatcagcaaaacccagaaggaaatttgcttaacaggatcattatcaaagctcttcttatcaacatgcttaacttgttgcttaaattgcgctcgcgtagctaaagactgagtctgttttgtcgttagcttggccttacttaaattcaattgttgctgggcggtgtttaggctagttagcagctctgattttagatcactgtccattttttcatcactatagtaagttgcagctaattgattattcttttgttcaattaaaacatagccatcgatatcttcatctttatacgcctttttagccttagcttcagtgctatagttgtcaaagtcttctgactttttaattgcttgctttaaggcagaattagaagtaactaccccgacatagttgtcatcactgccgccagctgataccattccgataacaaatgaaaagaagacgagcagaaacggtgctaaaatcatcagcaaatatgaccaagttttcacttctctacggtaggtttcttttgcgacaagccagatcttattcatgacgcgcacctgctttcattttgaaaatctcgtctaaagttggaggttcctggtcaaaagtctggatatattgaccggccgaaagttggttaaaaatatccttaccatatttttcgtctgcaagaataagcagcttcattccattgttttgcaaaattatatcttttacacctggtaaggctgataattcagtagcacttttgtctgtcctgacaaaaattcgagttaggccaaagctgttcttaatttcatttactgggccattcaagacgatatgcccatcattgatcattacgacgtcatcgcacaattcttccacgttacgcatatcatgatcagaaaaaatgatcgtagcgccttttcttttttcttccaaaatcagctgcttcattagatcaacattaacaggatctagtccactgaatggttcatctaaaataatcaatttaggttgatgaattaaagttgcaatcatctgtactttttgttggttacctttagacaaagacttaatcttatccatggggatccctttaacagccaaacgtgataaccaatcaggcaattcttcttttacctttttagccggcatccctttaaggctagccaaaaacactacctgatctgaaatagttaacttaggcatcaaacttcgctcttcaggcagatagccaatattgtcataatctttagcgttgaaagaatgtccatcaatactaatctggccgtcataatcaacgaatttcaaaatactatgaaagatcgtcgacttacccgacccatttttaccaaccagtccaagaatacgcccatctgacacactgaagctaacatcaaacaaaacctgtgttgacccgaagcttttatttaggtgttctatttttaacataatttttcctcaactttttatctaatggttattagacctagaagtacaccgtcaaagaactgccataaagtatcggttgaaaaaattgtttttacaatatcaactgacccccaattggttactaaagtaatcactacaccagctgaagcaaccactactcctgtaccaataacttgaggggcaagtttcaacactttcttctgccatggaatctttgatgcgaccgttttattaaggactaagcttgcggacatgatgccaccaaacattagaccgaaagccaatccggctccaatcgacataataatttgaaaaggttgaggcgaaccagcagtcttaacatacatcatcacaagagctaatattggtccaacaagtgctccaattcccatgccttcaataattcgtttgttttcacgagcaaatttttcattattcattgttcttacctcaaggaaattttcagctaattaaacaaatccgaaaacttagtcggaatgttgttcttggcgaagtatttcttgaatgcatccccaaaactcaattgatctttttctctattttcaagcaaatcatgaacagctaagaatgctgtaacggcgtaattaacggctaaaatgattaacaaaccgagcacaatataaattaagtacagcattgttctttcctccaattcagcgattatctcccaggaaataatcttttatccttttaaattaatcatatccccatcatttatgtaaaaggtaaaaccgtccaattctgtcatttttcggactgattttgcattttattcttcatcttttttataaactaataaatcccctggttgacaatccaagacttcacagatcttgctcaacgtgtcgaagcgaacgccatgcgcctttcctgtcttcagaatcgacaggttagccggcgttataccaactttctctgccaactcctttgaagacatctttcgcttcaagagcataaaatctagtgtcacttcaatcatctatatcaacctttctaaataatcgagtctgcatcctcctgaaccttcattccgtacttgaataccaagtagactacgtatagtactgctaggaaaagcaaaccagttgtcacaccacttgggtatagtacattattcgaggatttagcgaaccaagtgcggtgagttatgaaaataatgtaatctattattgaaataagggtatatccagcaactgaaattaataatttcttgagtaaattcaaattactatcagcaaagtaaacttcttgcttgatattcttaacaattaatctggcatatcgacagattaaaaaggctgcaacgctcatcatgatcagtgatagcaacacaaccactattgcaccgatatagttatcaactgatacgccttttatacccctaccactttcaaagccagcacgaaaatccggattatgtataccaaataacacaacacctcccataacgatccacataattattcctatcacacaaaatatttggtaaatccaagcaaaaatcgtaagcaaattcaaaattaattttttcatttttctatcctctcaaaatatggatgattctgtatatagcactgccaattacacccgttactccaattactaataatgtaattctaagaacactccatgttccgcctaagttagcaaacactaagattgccatcattatcagcattccaataattgaacctatctgtcttttcttttctggaagcatatctatccctctcttccataaaactatctatctctttctcgtcttttataattattgtattacgataatttataattgcaatacagaaataaaatattttttggggataataaaaaaataccaaattagtcgttaaactaacttggtattatgttttatcttccaagctactgctttttacttttcttcttatagtaagagttcatgaaaatattcataaagataacaaaggctacactttcaactatattccaaaatactgttccaaagcttaatgttttgtactgaaaatagtcccataccaatcctattaacagggccaaaataccagcgatgatacttctgtttctaacttggcgctcggttaaaattttatttttcataatttttaccccattattatcatatcgaaaaataggaaatctattaaccgaattttctattttttaatattatctatgtttatgttttttatgtctattttgtttggcgaaatctttaacagcgccttctacacatccttttatcataccacttccgctagggagcgcatcaatgaaacccgataaacatgatccacctacaccaagccagttagtgccaccacttactttttctaattctttataattcatttctttcatcataaaagttacctccttttttacaaatgtgatacacaagaaactgatccgctaataatacccacattagcaccaaatatagctccacctactgtaccaattggagtaccaaatgcagtgcctgcaatgccatattttagtccatccttcaacgctcccattccaatagctttagcacaatttgtgatttttctacggcgtcttgctttaccaccgttaccaccgaaaacagctgacagttcttcataagttaaagtttcaaatttgttcatgtttttcccctttataaaacttctaattacaattttcataagtgaattaagttttacctctcttcaacttacacactaataatacaaaacaatttaccttcattggcgtataataccgatttagcacgaaacaagatctatttggaaaatatttaccaaatcggccaagttttcgtatattagtaatttacaaaggattcttattaattgttacgctaacttgatattctgttttataaatccgaaaactagtaaaaacatagacacaatgcacttattatgagaatggctaacaaaaaaatcttctcatagccaaggctacaagaagattgccatcacattaatgcataaactgatacgcacgctctttactttaataaaacatgatcaattatacgactataacatagccactcaaaaccaaaaacttgagtcgaaatcaaataatcatttttagcatagtaacctacgaaaaaaatcacaagtttcataggtttctttgcgttatcttctaagtattacgatattttctattggagatatttttagcctattcgcaccagtatttttttcaatacttatctactagttattatctacctctatgaaaagaactttggaaaaacttaggattttccaaataaacgtctcgtttatgattaccacctttcttactgtataaaggtagcatgtgttcagtatcagttagaccaatatcatctacagaacctgacccacctaaaattccgcttaaaagtacttcatctttagaaataatgattcgtttcatctacttttcctccttagttttctttcctaatgaaatgcccaaaactaaactgattaagatactaatcattccaattaattgaccccagatattatccttctcacctgtagatggtaaagactgagtagaaccatttttaatagtgtcattttccaatcgctttaacttagtaattctattttgattgttcttaacggcactataaggcttgctttgcacttttactgaatcaaattgtttattttctttcacacttccgtgtttttcactaactgctgctagaataatattctttttatgcgatttagctgttttcttgaccttagtggctacgattttaggttttactggcttcttcacagttttcttcttagtttcagctctaggagccgcatactcttgattacctgtcgtaactttagtcagatctgcagtagagctagcaacatttgcagcattctcaaatacgctattttcaacaaagtcagtaatagcaacgtcattgctagactgtgtttgatcatcttcagctacagtcacttcaggtatttcattactttcagattcagtagtattatcatccttcggttgatccttaattactgcctgttccactaatttattagctgcatcagaatacaaaaagttatataactcttgtcccgtcttttctccaccgacccatgcactaataatttttccattaataaatctcattgtagttggagtacctggaataccaatttctttgaaggcatactcatgtgctccttcttcagcatcaatattgaaataaagcagcttacctttaacgatttcattgaaatcttttaaatcaggtgaaaattgtcgacagtagtaacatgttggacgaccgatatacataagatgttcttgattatttttctctgctagaagatcttttacttcttgcatttttactctatgaaaatcttttacattgttctcataatcttcaacagatacctcatcttcatcatcttcactatcttcctcatttgcattattaggatcttgattattagtattctgtgactgattattttgatcttcagaagctgctggctcttcttcctgcttattttgagtttgagctgcttcgttcttactactagttttctgctcagattcggaaacatttttatcatcattttctgttttagatactacttcacttttattctcttgagaagtattaccttcatccgcatgcacaatagtactattcatcatcaataatactgctgggctcaacattaacattaatatttttttcttattcatagatcttcctccgtattttttataactaagaaaaatatatcaattatcagctatctttttggttatcagacttattcagtacactttttgaccaaatcagttatcaaaataattggaatttgattctaactaaaaaagagcttttcagctccttttaattttggttaagaattttatccttaaaatattcaaaatatgtactcttacctgtaataatagttgcgttgcgttgccttccatcccatatttcaaatttttcttggacttggccttacagattacttcatagacattatttccgcgtagattaatgggatatactccaatttctttcacttttcctactaatctatccattgttccactagcattagctacctgaaaatacagtgtttggcctttttttattgccccaattttattacctgggaaataagtaactacattgaccgttcttttagccttaatcatcggaaacaagtgaactgtattctcctgtttatcatcaagatgaactagccatttttctctatttcttctaacaatttgtccttcatgatagtttctattggcaatattaagtgtattttgtggttctacaattccggtagatgtaactgtactttgtctagttgcaaagaaagaaccgactattaagatcagaactaaaattgccataggaataataatcatagttgaaaaattcttgaatttataggaatagtattcggtactctcatagtctttattattcataacgttgctcctaattctcaactaagttatagtaaaagccatgtttctgcattaatttctcatgacttccttgctcaacaatttgaccatgatctacaaccacaatattgttagtcctttgtgcaattgctaaacgatgagcaataaaaataatcgttttatcttttaatttcattaaattatctactacttttttctctgtaatcgtatcaagcccgctagtggcttcatcaaaaattaaaattttagccggtgacaataatgcacgtgcaatagttagcctttgcttttgcccaccggataaaatcttggcattttcatccatcttggtttcaaactgcagtggtaattgttcgatttcagactcaatttctgctatctgacaggctttcaatatatctttttctgtaatatctggtcgactacctaagagcagattttctttgattgttcctgagaagatgtatggtgtttggggaacatagtttacgtatgaccgtaagacatgcttatctactttagtagaattaaatccattaaaagttaacttgcctttgcttggagagaagaaatcaactaaaagtttgaccatagtagacttacctgagccactcatccctacgattgccaacttatcattgggttcgatttttaaattaatatcttttaatacatcgactccatagccataatgatagtcaacatgatgatattcaatctcacctgctaattgcttggcatccctaatctgagcatctttctggaactcactcttaaccatgtatacttcattcaatcgattttgtgctacattagctgattgtagagttggttgaagattaataatgctctgaagtggatctacaaaatacgatagtaatgcgttgaaggtcattaattgaccaatgctcatctgcccgttcattacaaccttagcccctacccagaggataattacattgagagataactgaatgaaggtctttaaagctgactgcaaagattcagttttactgtaacgaaaagatttcttgaggtaatcgacgaattgactatcaatcttacgataacgtgtttgttcgctatttaaagctttgattgtttcaattccttgaatatcttcaattactgaagaacttaagacagcattactctccatctgatcattattcatcttttcaaatttcttagaaaagctaagaatcaacactgcataaattggcaaagacagtagagtaatcacaaatagagtggaattttgaattgccaaaactattcccatcacaattacaattgaaagatcaagaaataatgaaataactgtactggcgagtgcgtcaataattcgactagcatcagagaaccttgaggtaatttcccctgttctacgagttacgaagaattccattggtaattcaaaaatatggcgaatgtattgtaagttaagatcaatacttaatcgctgacctagaacatccaatagaaaattttgcccgtaagaaaagatagagttgaaaacatatgctatcaataaaccaatagctaggatcgacaaagtttggtatgtaccgctaggaatataagtatcaattaagccttgcaagaagtatgagctacaaatactaatgattgtcatcaaaagagcagccaaaataatattagtgactagtttcttttgtttgaacatgtatggaaatagtgaccacagattttgctttttctctttgagtggctcaaaatcatcatttgggaccataaaaagggcaattcccgtccattcttgagaaaacttttctttagacattttcgttaaaccaacgctaggatccggatcagcaatcactaaataatttttggttgccttaatcacaacataatagtggagtaattcgccttgctttaagacgtgtacgatgaaaggatattgaatgtctgcatcaggatcaaacaaggacatgtcagctttaactgcttcagtttttagattaaatgcttgtgctgttttaactaagcccagagcggtagtcccttctaaattagtgcgggctgaatgacgtaaatgggctaaaaatactctagaatgatattttttaagaatcatagctaagcatgcaactccacaatctgattcgtctacttgtggtacataaattgatttatactgtagtaacatcttttccactcctcatattaagttgaatccattatttcatgattggaaaactaaatgtaaaaaaataccaaatcggttattctcattaccgattcggtattttagttttctaactagattgagctactcaactttaatattttcaaatttatctacaagctttttaaccacggctttatacgatctagaataagttaccatctgaccattatcaaatataataatgcgttccttcgtgtcaattgcactaatgttcttaggatttaccaaagaagattgcgaaacttttgccaagaatgggttttctttatcaatctgagtaatatttgccttatactcaacttctccattctcagtaaccatatgtactttatgctgtgtagtactgtgttcaatgaaaagtatatcgccttcggccactttacatacgcgccgaccaatcttataagtaaagtcacgttgactaaacttaattctgttagataaattatcgaaggcgttacgtaacgtttcttcgatacgttgaataatcttatcagacgacatagacttactaatataatcaattgcaccgatacgacggcgatacgttaatggagcgtacttatcgtacgccgttacgaagatgatctgggcattttcgtcattcttcttgatgaattcagctaaatctacgccattcttagctttagactctcgacttaattcaatatctaagaagtagataccattcttaatatcatttgtgactatgtatcctaccgcttgagcaaaatcgttagcaacaaacgtaacagattcatttaattcagcgtaaccttcattatcatctattaagtcttgaatagatgcattgatattcttagccatctgattagctaaatctttatcgtcatcgcatacaatgattgggaacttactcatcctcttcaccatcttccgtatcaattgtcatataaaagtcgaaccagccgtcttgaattgtataagaaatagacatatcaggatatttactctcaatttccttaatattagctaatccaagccctttatggtctttcttagtagtaaagccacgttgttgaatttgactagttgagatatttttattttggattttatttctgatttcgaactcaaattcatctgggtcatcagaatagaccattatttggacttcagcacttcgaatatcatgcttttcggcaatcaatgctttactttcctcaattgcattatcgaaagtaatgccaataatacgtactagatcgagttcatctacatggtctggtaaattacggatattatttcgacattcaaaattatatggtatatccaaattatacaattctgttatctttggaataataatgctcttaattgatttaacgtaaatgtgatttaggtctttatatttaagtaaggctttagaatttaggttagtttcagtatatttatctagtttctgaattacttcttgaacgttaccttcttgcgcacttacctttaaagaattaagaatatttttgtaatcatgtctgaaggcgcgaagatcatcttcacttttttcaagataagaagcatattcttcaagctgatgctgctgttgctttaatttttcttgatcctttttatttaaaagtttttcttgtaccatcgtcatttcatgatatataaatatagcaaaaatagtttggataagaatatagagagaaaagaacaaagttaatggtgtaaaagatttgctttgaatatatatgatagagatgctcaccgtagaaacataggtataagctaatatgcctacgaaaattttattattttggtttgctagataattatatatttttccattacctagttttattgcaactatcatcattagtattagtaagaaacgtagtgataattggcctatcaaagtaaatgacataacctgagtgatcatatcagacacaatatcaactaataaatctaatgtgcatactaatattattgaaccaaatagtatttctaatgtattattttttctcaaatataatacaaaaagcaaagtttcaagtatatttgtgaagattacgccaatattacctatagacaataacaaccctaaaaaaatattagcaatacacaaaaatagaatctgtctctttttagatcttactcttgatattttaaaaaaacaccatacatctgctaaactagaaaaaacattaagaaaaagaaataagactatcttttccatatattattccaaagttttttactcaagaaattaaaaccaacatgtgccgtgcttccaccaacaaccttagtcaattcttcttccttcaaaacagtctttttaacattttgcttcttcatgatatttcatcctttcatgattttatactcaacttgtttacacctttaatatatcatgtacttttaagtaaattaaaaaagataccaattcagtcatactttcgtaccgatccggtttcatatttcttcaaacgtaaacaactgacaattaattttcttagctaattcctgacagctatccgtaaagccagatttggaaaatagataataatgcttaagtggatacttgaagatttcactatttgtaatcaatttttctaacacactacgagagatcggttcattcttccatttacattcgccgaaatatccatcacgttcatcgtcagagaatcctacaatatctaactcaacttgttgatgtgttctcttatcggttccccaccaattgcccaagtggataaacggattaggaacaattttttcattcatatcctgagaccacatgaagtcttgactgtatttttcaaactcaggtcccatgaaatcagatagacccttttgtacttttacccaagcaagatcagttaagccacgctcaattagatcggtttgcttgccaacaaaggtataccagaagcggaacatcccgtcacagatacgataaacgatatttttgcttttactcttcttttgctcagtaaccggtaactttttctcaacaatacctaaatctatcaaattattcaggtacgtggttagcggaccagtttgtaagtgggcggattgcgcaattttactatgcttagaagcacctgaagctatcgcattgataatcgaattatagttagttggatcgcgtaattcctgttgtaacaagttattaggctcatcaaataagcgacctgatttactcaaaaagtttttcttaatattatccgcaactgacatgctgtctgacatataactcaaatattggggtacaccgccacaaaccgtattgatgataaaagcgtcctctttactgagttttggtaacatttcatgtgcttctgataatttaaatggttcaagctttaaggctaaagtgcgacgaccatatagtggactttggtagcctaagacttgtcgttccataaatgacatcgatgaaccacataaaatcaaaaataggttagtttctttgaattcatgatcaatgtaggattgcaacattgaactaattgtagggtaagccttagccaaataaggaaattcgtcaataactaaaattacacgttgtttttgagctaggtgtgtaatttctttaaagcattcctcaaaatttgcaaatttttcttttccaccctgatctgtatttttaaaaatactaattgcatcagaaaaacgttttagattatcttccgcattttcttcaagtgctacataataaattgactttttatcttttaaaaactcattgatcagtgaagtctttccaattcttcttcgaccatagatcactgtaaattgaaaatcattttcttgatacgcctgattcaattgctctaattcttgatgtctacctacaaacatagcgcactccttttcactacatcgtaatatactacattatattatactataacacgatatagtataacgtaatgtacgtgtattctatttttgtaataaaaatggccgttacttagagaaatagcgaagatcattaaattttaacatgctataataacaatagaacaagaataaaaagttttagcgtgcgcgttgaggtagctcctcaacttagtcattaacgtgtggctctgctttggcaaagcttttttgttatgttaataccctacaaaaaagaccgtgcatccctgcacggtcttttcatcttatcacatctattttctaacgtattcgccgttcttgtacttaaattcaatcttcttgttaggcaattgaaccgtaattctgcgatatacaggaccgaagccgtgcttttcaagcttaactttcacgctaccgtccttgtttaccttaaccttgtacaagttgtattcgcccttttggtacttaaagtcagttccgttatcttgatagtgaacgtacttaccctttttaccaaatagtctaaaggtcatactctcgtctggttcaccagagatgtggctaacttctttaccccatggcaagatagtgttcttcttgataaacagtggcaacttgccaattggtgcatcaaccaaaatcgtggtctttccagcatgttcaacaccattccagaaatcaatccattttccttttggcaaatatacggcacgcttggtttgaccttcttgaacaactggggctgccaaaatgtcctcgcctaccatatattcatcattcaagttatacacctgtggatcattttcataattaaggacaagtggacgcataattggcaaacctgtcttagtttcacgatagaattcatcgtaaagatatggaatgaaacggtaacgcagcttcaagtacttacggtaaattgacaaggttggttcgccaaatatccatggttcttgtgagcgagttcctagagccgcatggtttctgtacaatggactaaacaatgcgccttcgatccaacgagtcaacaattcaggtgttgtgtcagcaccaaagccaccgatatcagtaccggcaaagctgaatccactcatacctaagttacataattgtggaatcatcatttggacatgtgtccataaactttggttgtcaccagtccaaactgtggaaaacttttgcgttcctgcatatgctgcacgcgtaatgacaaatgggcgttttccactgaatttcttcaaaccttcataagttgccttagccatgttatgaccatagacattgtgcatcttcttatgagttgaagcttcttcttcattatggaagacgatattttgtggaatttcacccttgaaggatgcaggttcattcatatcgtcccagatacctgaaacaccaaggtcaactaagtacttgcagttcttagcccaccacttacgtacttctttgcggccaaagtctgggaagactgaatcgccaggccaaacttggtttacataaacagtgccatctggagcctttacgaagtagcccttttcgataccttccttgtagatcttatagtcatcatctttcttaacgccagggtcaataatcgtgattattctgaagcccaatttacgcatcttagctacgaatttctctggtgactcatagttatcttttctccaggtaaatactctgtagccgcgcatataatcgatatccaggtgtaaaacgtcacatggtaagtcatacttacgcaagttttcagcaatcttctcaacttgcttttgactgacactgtagccccaacgtgattgttgatagcccaaagtccacttttgtggcattggtacacgaccagttaaataagtgtagttagtaataacttccttgagtgagtcaccaccgatgatgtagtagtcaatattgccatcaaccgctgagtagtagtaatagtcattactttccttacctaagtcgatgtggttgcgataagtattgtcaaaaaagataccgtaaggatgaccattttttaatcctaataaaattggaatcgacttatacaaacgggtaaagctctctacttgcggatcaggattgtcagtattccaattatcataagcatagtggcgtttgttcaaatagccggttttatcacccaagccataaaattcttcgtcatctgctagtgacttgaccacttcataataatcggcgtcatgctttcccagtaatttatccacatcatggccttcagattcagccagcttcaaatgttcctcatccatctgtcggtcaattggggttcttttcccccgataatctacgaccaatggattgccttgttcatcaaagacgtcaattttttcatcatcataagcttttactatcaacttagccgtagctatttcaatatgatcgcctttatttttaactgtaaaatcagttttaatttctttatcgccttcgatagcataagaattgctagcattacctcgatcttgaaagaatcgcataatttccggtgttaacacggtcaaaatcattggtccattctcatagtttaaggtaattttttgtccatctttagtaaaatcagtaagttgattaatcataatttacctctaaaaaatcaaaagttatgtattcgctttcaattttaacacaataagctaatcaattgggtcataccagaaaaaacaccttcagaaatttttgtatttaaatacaaaaaaactgccttacggcagttttatttaatttattccattggaaaaatcttatctggattcaaaacataatttggatcaaaaacatgcttgatctttctcaaaagttcagtgtaatcatgaccatagaaatcctcaaaccaatctttgcaggcataaccaataccatgctcgccagacatatttccatccaaagctttagctgtcttataaagttcggtaatcacataatgactcttttgctcaaactcttcgtcactcattgcatctgagcaaagataaatatgtaaattaccatcgccggcatgaccaaagttaggaattcgcataccaacctcttgttccaattcatcaactctatgcaaaacatcaggaatatgattaattggcacacaaatatcaacttcatccatctttggcgtagacttttgaatagccaaaagcaatgcttcccgacaagtccaaatcttctttgcttcctctgaattagcatctaaaattaccgcatcagctgctttaaacttcttcgttgctgcaagggcaagctttaattccgcatccaattcctctttagttaaagaagcaagccctagaataatgaagccatcgccatttgcaatcgggaatttttcatcgtaatacttttcccagagactaatgacttttctacccataaattcaacggttgttggcactacaccagaagccaaaattgctggtactgatttaattgctttatccaaattaggaaacggaataattgcattgatcgattgtttaggacgtggatataaacgcatggtaacttcagttactacacctaaagtcccttctgagccaatgatcaggtcttttaacgaataacctgatgaggacttaactgccttagcgccaaatttgtaaagtttaccatcagttaaaacaaccttcaattcgcggatatgttctcgagtaacgccatatttaattgctttcaacccaccggcgttagtatccacattaccaccaattgtagcccaatgcattgctggagctggcatataagtaaatggtttattggctaaatattcttcaatatctttcaaccgaatacctgcttgcacagtcatcgttagactttctggctcgtattccaaaaccttattcattttcaccatatccagtgaaatgccaccttcaacggttaaattgccacccattagaccagtcgaattaccacgcggaacgataggaatatgatgatcgcttgcatatttaacaacgttttcgacttcttcattagtttcaggttgaattaccaagtaaggcattgctctaaccgtcttaaattggtcatgatcccaatgaacagttggcttagtaatgaatcgctctggatctgagataaatttactcaaattatctatatctgttgcagttaattttttaaagtccatctttgacacttctttccaaattgaaacatcctatattaactaatgtatccgcttttgtaagcggtgtcaaaaacaagaactgaagatttttttatctaaaaaagcaaatttccatactacctcactttaaaatgcgatagtatcgactttcatttaaataactattacacaaaatatgaaaataaaaaaactgccttacgacagtttctagttaaataaatccgacatcttagttggaatattattgtttttcacaaaatactttttaaaagtaggtaaatctgcattttcttttttcacatacatatcatgtaaagcccaaaatgcagtgattaacaaattaacgcccaagacaattaacataccgattaaaatatatactaagtaaagcattgatctatcccccgctatatcgtcacttgacccagagtcgcatcttcaatgaagtatctgacgaaagcttgattgaagctcatgccctggccgttgtaaacatgccactcttcgcgtttggcacctacagttctaatgattgaaattactgtgcaaattaccaaatatgcgattagcacgttaaaaattattttcattaccagcatgtctacacttcctctctgtactgctcaactaatacactaatatttattagtcaatttgtcaacatcttttagtatttacttttttctccccaggtataaaaagccatagatagctggtccgatcactaccgccccagctatagaaactataatcactgcaataaagcgaggcatagcaaaaaattccgagctaaatttcatacaggcccaggccccaaagaaaaaaatcgcccagccaattaaaattgaaattagcatatttaaacctgaaaatttaggtttagagtttttattgttcatcaagttttctctttcataaaaatattgtgccacaaattgaaggtcaataaacaaaagtgacagattcggtcgttttttagacttatttggtaaaaaataagggagattaagtaaaatatggcgcttaatctcccttttgaatcaataattatttgcccataagacctgaaaaagccattcctaaggcagcaccaccacatgcacctgctttagctgatacgggacgagcataactagtaattgcataatgaaacttcatcacatcatgtgacaatttaccctgccagcttaatggatcaagaccaactcgaattaagttgcagacataattagctgattcaccattttctaactcatgctttgcatcaagtaggatttttctttcttctggcttagtatcttcatttactagtaggtcagtaatattacttaatagccattgttttaaatcatctttattttcttgatacatttttatccctctttttcgactttttcattaatatcaggatgcatccctacaaccattttagaatctttcatgttcttcatcgattcatttattttaataaaaaactctgcaagtagcagagctttttacctcattgcagagttacttatacatatacttagcacatgcttttttagaatccataccattacgaatcttcaaagctaattcaatcgatacatccgcaataattgattgtgggtcaatcacattgtaaggatgatctggtgccttttcctgagctaacgacaattctgtacatcccagcaagattacgttgcagccataatcatcatgcattttttgcaagatctggtggtacaatttaccatcaaccattcccttttctttaatatcggaataaatgagcttattaaccatcggttgaatttccggaccacctaattctgcctcacggtgaaccgcatgaatttcatccacatacaaatgatcatagattgacccttcagtcgcaatcaagccaattttcttttcttgtgggtatttttcaataaattgatgcactgctattctcatcatgtgtaaaaatggaatatcagtcaatgcagccaaatcatcataaaaatagtgagcggtattgcatggcatcacatagaagtctggtcccaatttggcttggcccagaacatcgtcacgtaaatcatagaaaaagtttggtttagtatgatctttaatataagccgttctatcaggaatttgtgcatcattaaccaaaatataatttaaataatcttggtccttagctatttttacacggtgattaattaaacgaacgtagctttctgtggcaatagttcccatgccgccaataatactaaagaagtgtttcactattttcacttactttctaaagtgttcttcttgaccttccaactcattaattacctgctgtgcaaccacaatatcagatggatatggggtatttactccgcgaattttttggaaagcgtcagcccccttaccacagattagcacaacatcatctggcgtagccatggcaatcgcatcatgaatggccttcttacgatctaactcaatagtaacgtcgcacttagagtgatctattcctgaatcaatttcttcggcaatactctttggatcttcaaagcctggatcgtctgtagttaaaaatgctttatctgcgtatgcagtcaaactttcactaaaaccgggacgacgtgacacgcctttatcaccaggagctccaacaacaacaataattttaggatcgttgaattcgttacgcataaatctcattaaagccatcattgaggccttattatgagcgtagtcaactacaaccatgccgtgcttctttgttctctcggtttgcatccggcctggaatagtaacatcgcgaatacccttcgcacattgatcatggttaagtccagccaagcctgctccaataattgcggcagtaccatttgactcgttgaaatcacccagcatctttaaagtataatcaccattaattggtaatttacgtgccttatcactagcacaaactaaattgaaccgagtttctttcatatctaattgttcagaagagaatctgaaatcaattggctgcttcaagtctggattttcaaaattatcgcgggcaaacaaataaatactatcggggttggtagtagttgttgcggcagcgtagacttcatcaaagtgtgcagtttcagcgttgataatacatttacgtgagttaacaagcaattgtaatttgcagtgcaaataatctgcaaaattagggtgttcgttaggaccaatatggtctggactaatattcaggaaaaagcctaaatcataagttaaaccgaagacacgatttttcttatatgcttgactagaaacttccattaccaagtgagtcatgccattatcaacagccgttctcatgtctcggaataagtccaaactctctggtgtggtcaagcttgacttaaagctatcttcaggcttaggaccgaccacatcattaactgaagaaatcagagctgtcttaccaccatttgcttgatcaagcatccctttcaaaaagtatgctgatgtagtctttccctttgtaccagtgaaagctacaacaaacaagtcatcttgtggaaaacggaagaaagcagctgacaaaagagccattgccttagaaacatcgcgcacaattaaagcgtgcattccttttccttctggatatggttgttcagctacataacaaatggccccattgtctttagccattgacaaataagttggtctaaagcctgctcccttgcagaagaacaatgtattagtttgaatatcgcgtgagtcataagacacatagtccattttagtagctactgtatcttgcactgcgcttgacttgagcaagtgatgctcttttaagatcaatatacaggtatttaaggaaatactcattaacttttctcctcgttgtatttaaaacatttcagtcaaaattataacacagctagtgtgttggtgacgctttcttcggatcaagtggcaaacgaataataaaactagtccacttttcgtttgattcacagcgaattgtaccatggtgtaaatcaaccacacctttggtgatagataatcccagaccagttccgcctgtcttagtatttcgcgaagtttctacccggtaaaaacgctcaaagattttatttaatgatttcttcggaattggtgccccattattttcaacgcgcaactctacttcacgtttgttgactaaattggctaccaatttaattttagttgcccctgtaccatacttgaaagcattagaaatcaaattattgtaaacgcggaccagcttttccgcatcagccttaatcgttagattctttggccgcgcttcaatctctatttcaatgccatttttttctgcttctaattcaaagccggccgctacctgctccaacattgaataaatatgcaaatcattcagatttaacttagtattggtcgactttaaagtagtatattcaaacagatcgttagccagtgctttcatttgttctgccttagtataggcaatattgacatactttttctgatcttctggcgaagtcactcctgcttttaacaaaccaagataaccaataattgatgttagcggcgttctgatatcgtgcgaaacattagtgatcaattcatccttagattgctcaattgcccgttcttcattaatcgaatttacagtactatcaaccaacgaattaatcgaatccactactcgttgcaattctggtcgtacccgaaaattaatccgatgatcaaaatgaccattagcaatatagtgaagttccaaaataatgtgacgtagctgcatttggtgatagcgtcgaatcaagcgccagtacaaaacaaccaagtcgcccactcccattaagacgatgaatacgttttgccaggaccagagatgatagccacctgcaaaagtgatcgtcttttttagaaagtagattccgttgaccaggctttcatcctgcaaaatagctaagtgaatcagaatgataattgataaatttaataaaaacagaaggacgaccgttacgaccccttctgcaaacaattcgctcttttcggcgccagttagcttgacgcgttcttttttcatcttatgcctcgaccttgtaacctacgccccaaacagtttggatgacatcctcaccatcagtggctttttgaattttatcacgaaggtgtgacacgtgtaccatgacagttttagctgaaacaattgattcttgttgccaaacacgttcaaagatttcatcagctgaaaaaacacggttagggtgactagcaagtaagtataagataccgaattctaaggcagttaattggatagtcttaccatcaatagtcttaacttcatgtgaatcacggttaattaccaatggtcctacttccaaaatatctggtttttcattcttaacttgcttttgacttcttctcaaaagtgaacgtacacgagccattacttcaagtggattgaatggcttagaaacatagtcatcagcaccagtgattaagccttgaatcttgtccatatcaccggttttagcagaaacaataataattggaatatcggagtcttttctaacttccttaattacatcgattcctgacatatttggcatcatcacatccaaaatcatcaaaacgatatctggcgtagtggtcaatttagtaattgcttccttaccactatatgccgcaacaggttcatatccttcatttttaaggtagatacttaatagttctacgatttctttgtcatcatcaacaactaaaattttcacgaggaatgttcccccttcttgtttattattctctgtttttctatctacagtttagcagatatcatatagaatattttacacattttagaaaaatatactgctttcattatcctttttaaacaaaagctaaaaaaatacacgtttctccatcatgaaaaacgtgtattcattctatttactttaccttatcatcatgcaatttagtttcgacataaacgcagacgataaatagcaaagcaaaacagcagatcttaggtgctgttgcataatcaagcatgctagcaaaaccgaataagataccatctggaacaacccaccaggagccgatcgaagaattaaaggtatcactaactgtcgcaaagaatgcaattaaaatcgttaaaacaagtaaaactgaagttaagatcattcccggccgaccaaaatctttaaaaccatgatcccagtagactatcactccaagcagtaccaataagattgataccagccatagactaccctttttcataataaaggccttctttctgcccttatcctaacacgattaagtagcagctgccttgtttaacgcttattgaatttccttcttgccagtgtagagttcatagtagtaacccttttgcttgattaattcatcatggttaccatgttcaataatatgaccatgatcaagtaccaagattaaatctgagttaacaatcgttgacagacggtgagcaataacaaaactagttctaccagtaagcaagttgtccatcccggcttgaaccattttttcagttcgagtatcaatacttgaggtagcttcatcaagaatcattactggctcatcagcaatcattgcccgcgcaattgacaacagctgtatttgcccttgtgaaaggtcgccgccatcaccatcaatcacagtttcataaccgtgatcaaggtcatggataaattcatctgcgtgtgataacttggctgcttgataaacatcgtcatcactggcatctggattaccaaagcggatattgtccataattgtgccagtaaagagatgggtttcctgtaaaacaattgaaagtgattttctcaaatcatcttttttaatgtttttaattggaataccgtcataagtaatcgttcctgaatcaatatcgtagaaacggttaagcatgttagagatggttgtcttacctgcaccggtttcaccaactaaagctaccttcattcccggtttggcattaatggaaatgtcatgcaagatttgatgatctggtacgtagctaaagttaacatgatcaaaaataatatgaccacgaacttgaaccttcttggttgagccatctttttgtggtacattccagtaccacttactgccgacttcatcgtttttcttagaaagagtaactgtaccttggtcagcttctgacttttgatcttccaagttgaaaattctttctgcaccagctaaagccattacaatagagtttaattgttgcgaaattttggcaattggcatactgaattgcttagataactgtaagaatgaaccaatggcaccaagtgaaagcggagcccaactattaattgcagcagcaccaccaacaaaggcgatcaaaacgtaaagcaagttacccatgttacccataattgggaataaaattgtagcgtaagtgttagccttacctgaggcttgacgcaactcatcattatatttgtcaaagccttccttagattgtggctcatggctgaagaccttgatgaccttcaaaccattaagcatttcttcattataaccattgatttggcccagcttcttttgttggacttggaagaagtgacttgatctaaccgttaagtagcgcacaattccaaatgataaagcaaaaataatgaaggagaacacagtcaattgccaactaagtgaaaacatagcaactactacaaataataaactcaaagctgagttagtaaattgtggaattgactgtgaaatcatctgcatcaaggtatcaatatcgttagtataacgcgacatgatatcaccaaattcattttggtcaaagtatgaaattggcaagctttccatgtgaacaaacatttcgttacgtacacgatattgcactttttgagctaaaacacccatcagcatgttaaaaaggtaattagacaaaaaaccaatcgcatagatcccaaacattaccgcaattgcagtagctagagggccatagttaggaactttttctttagttaaaggcacaatataattattgatcaaacgttcaatgaataacgagccaataacgttgctggcagctgctagcacaatagtgatcatggaaacgatgagcatccatggacttgtactattaaccagtttcaataggcgcaataagattttggttctgctaccctttgtttgatttttacttttttccattgcttgatccaaattgctcacctactttccttgttcttcctggaatttagcgattgaactataaagttcgttagtcttcatcaattcatcgtgggttccgatagcttgaatttgaccatgatccatgacgataatccgatcagcatccttaattgaaacaattctttgtgaaataatgattttagtagtttctggcatatctttagccaaagacgttctaatttgtcgctcagtactggtatcaacagctgaagtggagtcatctaagatcaagatcttcggattcttaagcaaggctctggcaatagtaattctttgcttttgcccaccagaaacgttgttaccaccttgttccaccattgtgtcataaccatctggcatttcacgaataaagccatcagcatgggcgattttagcagcggcaattacttgttcatcggttgcattttcgttaccccacttgaggttatccttaatcgttcctgtgaacagcacattcttttgtaaaaccatcgcaacgttatcacgcaaggtcttcaagtcatatgacttaacgttgtgtcctgcaacccgaacggcaccagaagtaacatcataaagacgcggaatcattgaaaccaaggttgacttcgatgaacctgtttcaccaataatcccgattgtttcacctggcctaatgtgcaaattgatatcttttaaagcatcagccttgtccgcaggttcgtacttaaagctaacgtgatcaaagataatttcaccattggtcaaacgtttcaatggcttcttaggatcttcaattgttggttcttccgtaatcactgaccactggcacctgagataaccaattgcgtagtaatcatagctaaaatgtttaaactaaacaaaactgagtttgaataagtaaacattgaaattaattgaccagtttgtaaactaccgccaaccacttcttttgcaccgaaccagcagattgacagcgttgaaatattcaaaacagctgcaactactaatgcgttcaaagacataatcttttgtgcagtcgcaaacaacttgtaaataaagcctgatgacttcttgaattctttaatctgcggttgttcttggacataggtcttaacttcacgaataccacgtacgttttcacgcacaacctggttcattcggtcataccctctaaaaatcttaggaaagtatggataagctgttttaataatcaaacccaaagcaattgcaaaaaccggtcctaaaactgcaaagattaatgataaacgcggactaataataattgacataataattaaaacgatgaacatcattggtgctctaacagcaattctgatgatcatttgatatgccatttgcacgttgttaacgtcagtagtcaaacgtgtaactaaactggcacttgaaaagtgatcaatattttcaaaagaatagtcctgcatatggtagaacatgtcttggcgcaagtttgcggcaaaaccagcagctgcatgagctgagacataactcgcactagcgcctaaaattagcgaaataacggttaacactaatagcaatagccccattttactaatataggacatatcccccttcataattccgttatcaatcaaaattccgaccaaatatggaatcagcatttcaatgataacttcaccaataacaaacattggtgagagcaaagacaattttttatattgcctaattgatttgctcaatgttttgatcatagagacccacccttctattcttttattcaatctcgcaaataaaaagataaatggatcatctccatttatcttttttatctatattaagtttaagtatgtgcttatttttacggaaattcaattaacatgcttgcaaaacaggtaaattatttatgttgttgtggccttggtgcaaatgcggaaccaacaatattgtagtgctttctgaataaataacgtacaccataggcagccgccgcgataacgatgtcagctactgctggtaaaactgggttgattacgcgcaatgctgggatttgcaaaatccacatccagacaaacaaaacaactgctatagccaacattcttaagatcagcttaaccaatgaaggacgtttaccttgctgaggcattagccaatcattgtatttaaccatgaagatccccattaaaatacctacactggcaattgtcagaatccccatttgtgaattatacggttggttcttagtttggaataatgcaaggataccacataaaccaacaaaaattgctaaataaagcaatgcgccatcaaccatcaactgccaagttggtgtagccactggctttttcttaggatgaagcatttgttcagccttaattgctggtgaagccaggtaaagcccattggctggttgcccatgacgttgggcaataataatttcactgagcaagccattagtcatcgcaactgcatcagcacgtgacattgaaccttgtttttgcagttctttttctagacgaaaaacatagtcactgttcttgttactcaacttttcacgcaaagcttttggatcttcctgcttaattttttcatcctgagtatcaagctcagcttgcttctttaatttagcttgtttttcagtgttaatttttgtttgatcttgttctctctttgtctcttcagccattcttactcctagacgttaaatctaaattcaataatgtcaccgtcttgaacttcgtaatctttaccttcaagacgcagcttaccagcttctttaaccttttgcatagtttcaagcttgtctaaatcatcaaatgaaacaacttcagctcgaataaaaccacgctcaaagtctgagtgaataacaccagcaacttgtggagctttcatccctttgtggaaagtccaggcacgggtttcaggaccaccggcagtaaagaaagttctaaggcctaagatatgatatgcagcacgaatcaaacgatccaagcctgattcttctacgccttccatctcaaggaattctttcttttcatcatcagccataccagcgatttcttcttcagttgcagcagaaatacctaagcattctgcaccttcgctttcggcatgcttcttaacgatttggtaatacttgtcgctttctggatcagccattgaatcttcagcgatgttagcaacgtagataactggcttggaagttaacaagaacaagcccttaacaatcttttgttcatcttcattaaagtcaattgaacgggcagcattaccttcttcaagtactggctgcaatttattcaaaacagccatttcagccttggcttccttatcgccttgttgagcaaccttctttaccttattgattctgcggttaacagcatcgaggtccgcaatagcaagttccaagttaatagtattaatatcttcttctggatcaaccttaccagtaactgaggtaatattgtcatcatcaaaggcacgaacaacgtgaacgatggcatcagtttgacggatgttttcaaggaacttgttaccaagaccttcaccttttgaagcacccttaaccaatccagcaatatctgtaaattcaaaagttgtgtgcacaatcttcttagcaggaatcaattcttgaattcttgccaaacgcttgtcaggaacttcaaccattccgacatttggttcaatggtggcaaatggatagttagccatttcggcaccagccttagtaatcgcattaaacaaagttgacttaccaacgtttggtaaaccaacaataccagcagttaatgacatttgttgtcctctttttctaaaatcaattttttatttttacttacttgtctattttatccaaaatttggccgagcgatacgatcttttggcacatattgctctttttttgcattaaccggatcattcgccttagttaatagcttttttagcttccggttaaactcgctgcgcggcatcatgactatgtgcccacaacccatacattttaatttgatatcagcacccatgcgcaggatttcccaatcattagtctgacaagcatgaggctttttcatttgaactgtatcagccaaattataaacaatttctttagccatctaaatcaacacctaacaaatcaagaatgcggttcaattcttcagtcgaagcaaaatcaatcgataaatgacccttacctttttgtgtttccgaaatattaacactagagccaaacttgttagctaattggctttcactagcgcggataaaagcagactttttagcagttttcttgctgcgtggcttcttagcattcagttcattgacaaccgcttcaactttacgaaccggcatcccttccttgactactcgcttagccagcgcatcaatcttttccttatctttcaaacttaaaagcgttctagcttgtcccatcgacagttcaccatgttggagtaaacgcttagtcttgctaggtaaagtgagcaaacgcaaataattagcaatatatggtcgcgacttgcccatccgcttcgaaacttcttcttgcgttaagccaagattcttctgcagcatttcataagcttgcgcctcttcaagtggagttaaatcttcacgctgcaagttttctagaactgccacttccatcatttggctttcgttaaacttgcgaataattgctggaatagtcttcttcttagccaatttagaagcacggaaacgacgctcaccagcaatgatctcatatccattaactgattcgcgcacgataattggctggaaaacaccattttccttaatagaatccgacagttcttttaagctcttatcatcaaatctttttctaggctgataaggattcggccgaatatcgcccaaatcgagttcttggacttcttctgcctcttgaacttgaggctcatcctcaaataaggcttcaagaccacgacctaggccgcccttttttcttggctctttacttcttgagtctcttgtcatgagcttttaacacctcttttgctaaatcatcatataccttggcaccacgagattttggtgcatattctgtaattggctgaccataacttggggcctcagctaatttagtaattcgaggaatgatggtcttataaactttcttgctaaagtaggactgcacttctttaaccacttcagcacccaagttagttctggcatcaagcattgttaacaaaacgccttctacgccaagatctttattaaaatgcttttggactaaacgaattgtgttcaaaagttggctaagtccttccatagcataatattcactctgaactggaatcaaaattgaatcagatgcagtaaaagcattaattgaaagttgccctaatgatggcggacagtcaataaagacaaaatcatattgatcgctaattgcatctaaagctgactttaagcgtgtctcccgagccatcattgaaattagttccgtttcagcaccagacaagttgattgtggctggaaccatatctagctttggcgttgaagtatggtgaatagtatcttgaataggaatttcgtcaatcaaaacattgtaaatgtcctggtcaatctctgatttttcaattcctaaaccagaggtggcgttaccttgcggatcaatatccacaattaaaacgcgataaccacggtcggcaattgaggctgctaaattgatggtcgtagtggttttacctacgccacctttttggtttgcaaccgaaattacatttaccatattgttcatccttccctattacttccttttcaattcaattgtgatcttataatcatccggatctttattttctgttactttgactttaattcctgagtcttcggctaacttaaccgccttcttaatggtgttaatttgtacctttaagtctttaggaactcggctaacgacccgcttagcttcttttttagccttaggcttagggttaaagtaagcatccacatctttcacaatctcttcagtttgtttaacgtttaagccttttgcttcaatttctgtcaaaacgcgatcttgatctgcattacttaagccgatcattgcacgaccatgacgagcggtaattttgccagcaatcaaagcttgctgcacattatcatccagcttcaataagcgcaatttgttagccacataagattgagacttacccatatttttagccaaagcagtttgagtcaaatcattcaattccattaaattggtataagcttttgcctcatcaattggatttaagtcttcacgctgtaagttttcaatcaaagctaatgaagcagcttgatcatcactcatattcttgacgatcgcaggaatagtctgccagcccaagcttttagctgcacgataacgtctttcacctgcaataatctcatattgctcgtcatcgccatcttcacgaactacgataggttggagcaagccatccttatcaagtgtttcagctaattctttaattgaatcatcagaaaattcacgccgtggttgatagcggttaggaacaatcttgctcaattcaagatcttgaacctgtttattcttaggaatttcatcatcatgatgcataaaagaaaataatgacataatatacccctttctgtttaatgaatcggtttgcgccgcggggtgcctgcttgacgtggatactttttaggtgttgctttgactttttgaactaagattagagttcgttcttcttcgctctcaggtagagtcaattcttcttccttaatcagcttaccgcccagcaattcaagagctttttgaccatcatccaattcatcttcggcttttggtcccttgagggcaataaagtaaccatcttttttcaccaaaggcaagcaatattcactcaaaacactcatccgcgcaaccgcacgagcagtaacgagatcgaacttttctcgataaagcttattttgaccaacgtcttcagcgcggccatgaactaattcgacgtccttcaagtctaacttagtaattaagttctttaaaaaagtcaatcgttttgccaaagaatcaacaatagtaatcttcaattctggctgcaaaatcttgagcggaattgatggaaaaccagcaccagcaccaacatcacaaagagtagcaccatctttaaaaacatcgccaaaagtaaacagcggcgtaatactgtcataaaagtgcttaaggtaaacctcatcttcttcggtaattcgtgtcaaattgacatgctcattaacttcgatcaaataattaaaatatattttaaattgttcaatttgttggtcagttaatttaaaattgtgttttgatagttctaaaataaatttttcaggattcatttttcacccgtgaaaccgtgtttcacacctctaaatttaacgcaaaatgcattgattagtaaagatatttcatcttatcaattatgaagtatttttactcaatcgtcaaagttttgccgcccgcaaaatagggtataataaggcgcaaaggagttaaaaatatgattgttactttaattgttttagcttacttagcatataaaacatatttaggctataaaacaggctttacacgctatatcatcggtttaatctgttccgccattgtctttatggttgccattttcatgcaaaatccatttggtaattggctatacacacaatacactggagaaatgattaagactaactccactaacaacgtggaattaatgattgcacgctttgtcgctttctttattgttttcttcgtgggcaaaatgatcatgaagattgtcaaaagctggattcctaacaaaaatccacatgcgactaacttaggcagtattctcgacaatgtcttgggtgctctagcctccctaattgctagttattttgttgtttatgtagttttgtccatgttcaatgcactacaaaatccatggtttatgcagcaaacaattgattctagctttttgaggtttatcatttacaacacaccggggctttcaaacggtgtcttcaataatatctttaatattggcaaaactgtgggataaaatatatcaaaaaagatctgcttgtatcatactgagcagatctttattgatatgttttaactaaattaatactacatttatgaaccaacattcgatatacttattagcgcaggaagttttatgagcggcggctggttctccccccccggaggtgaggcctatgggctacattgatgaaagggttccagccatgtcggtttacgagagtatctccttgatgcttttgttcggtacatttttgttggctttgctgacatatattgaccaccaccaaaaataaaaaacgccgctcaaacatactttggccagttattgagtagcgtttaacgtaaaatttaacatttgaagccgccgctcttaaagcgggctgcttggagtccctaggactcctttttctttagtcattatagcatatttcactaatcaccgaaattatcatattcaatatgttcatcattataaacaaagattgcaccaattcgatcagggttatcatgccaaccctttagtggcttgccagcaaagaataatcgtttgcattcaatttctgcttcaaccgatgttttggtaaaagtagtcacaccagctaaatcagtctttacaggatacccggttctaggatcaatcaaatgatgatactttttaccgttaactactaagtagcgctcatatgtcccactagtaacggctgagcattcaggcaccataactgacgtaatattgtcgcctcgcggctgtttaggatcttgcacaccaattgaccactggccactaattcttttaggcgaatcaccaactaacaagatattaccgcccagattaataattcctgcttcaacgccatatgcacgccacaagtcacgaattcggtcggcaatccaacccttagcaattccacctaggtccagctccatgcccttcattttaagaaaaacagattggtcactgtcatttaaaaccaccttaaatgggtcagttaacagcattctatctttaatttcttcatctttaggaacatgtgcgcctttaaaaccgatatgccaaagcttaacaactggtccaatcagagcattaaagccaaaattctcacggctcttttctactgccaatttaaccaaaccatacacagcactagagacctgtaccggatgttctccagcagcatgattgatatccattacttcagattcatctcgattaacggtaaaaatatcttcgtaatgatcaattaaatcaaatgatttttgcaatagatcacgattttgagtaccaaaaatctgcaatgtaattgaagttcctaaagcatgatgatcaccaaccacctgctctaatgctaaatctttaatcataattatttctcttccaaatataaatcacgcaacgcctcacgtagttctgtcgttacgccaattttttcttgtaaaaagttatcgaaactaccaaaattctgctcaatagcgattaatgaagtatccaaaaaagcatcagaaactgaacctaaaattcgcatattagcgcgaaaacaaagattctcgccctcttcttgcatttttttatctcttttggcccgatagttattaagcatataatttgagtacaaatagtcctgtctaattgtttccatatctacgccaagcagatataacaagactacagttaccaatccagttctgtcttttccttctgaacaatgataaagtacagcacctttttcagtattggccaacagctctaaaattttatgcaagctatgttgagcgtgttctttcaatacatgtgacttgtaacgctcacacatcattctaaagccagcatactgatcttgacgataagttgcgaatacttgggttaagtctttcttaccgcctttggtgttgtcatcaacagaaattggaatacagaaatgctctacgccagggattttgctgtctggacaatggtcacattcagttggtgaacgcaaatcaataatcttagtcaagccataattgagcaaaaactcttgatcatgtctcgttatgttgctaatcttgcccgttcttaataaccgatgcatcttgaccttacgtccctgatagccaacatatccgcctaaatcacgcggattacaaactttttctaatggcaaaatatttggtttcattaatttcatctctttattaagtattttgataaaaaagccggatagtgtccctatccggtaattttactatcacgtggtaagtcacgcaaaattatttgttagcttgttcaacaaatttaataaagttagccatcatagcatctagttgcttaatataatcttcattggtcaaatcgccagtttctttatcaaaattgcttgcagcaccgccaattaagatttcattgcctggcaaaacattggcactcatgtctggtgaaagcaagatttcacgagcatcttcttgcgcacgactagatccttgaataccgtatgaagtaccaacaactgcagccggcttcatcttcatcacattaggaccagcatgtgaacctaaccattcaagcgcactctttaaggcagctggaattgagtgatcatattctggtgtagccaaaattacaccatccgcattcttaacatcctcgatccacttcttagtaacatcatctggctcatcagttctacagaaaggcttaagttgatcgatttctttaacttcaatatcagcttgctcaccataacgcttagcaataaattttgctaaaaaacgattgaaagaaaatggagcgtttgtaccaacaattgctaaaattttcatttaaataagccccctacttagtaagttgtgcataccaatcatcaacttcatcaaagaagtgattcaaaaacttaagtgtacctgcatcggtcaagtcgcctttatcatcaaattgttttggtgccaaacccatcataaattcgtcaccagcaaagacatgagcactaaaaccaggtgcgcccaaaatgctcttcaagcgagtttgcgaacgagacgcaccttgaggcattggtgaagttgacacaataactactggcttatcatggaatgggtgaacagaactagaaagccattcaagtgcactctttaaggcacttgaaaccgagtgttgctgttctggtgaagcgatcaaaaccatatctgcatcagcaatttttttacctaaagctaatacgctagcaggagcatcaacgccttctttatacataggcaagcccttaacagtcgcaaagtcaaaatcatacttatcgcctaagtccttaataatgactttaagtaatttttcgttaaatgagttatcggcattggagcccgataaagctaataccttcataaaaaccacctttccaaaatcctcttaattatcattatagactaatgtagtttaatttatgtcattttaattttaataacaacaagaaaaaacgccttcgataatgaaggcgccctctactgaatgaaaagcacaaatgattggtgaaatttctatgccaagttatccttaagcgaagcttcttcgtcggcagcaaacattgggttttcttgagtttcgctgagacgattgttaagcatagcatcgtggatttgagcattcaacacattgacgatttgagtttggctgaagcttgcaatctcattaacaatcaatgcagccatacctgtagtagaaatccagttagcaattacgatgtcatgaatcttttgatcatcataatcaacatcaggatattgttccttgaacttttcagttccaagttccatcaaagtgtcagcaatgatcttgctaccaaacttgccatcaacgaacattgctctaaacaagttaacatgagcttgagcaaaatcaatgtatgacaaatccaagtcaattaaaggttcaccaacgtacttttgttgtaaagtatgagttctcaagtcattagagattcttctcaaaacttgattgcgaagatcatccatgttgttaaattctagatacaaaggttgggttgagaagtgtcctgctttagcaatgctacgagcagtcaaaccttcaataccatccttgattgccatcttgtaggctgtatctaaaattttgtctttactaatttctttttttcttgccattttaatgcacctcaatcattgtataaaacatgtgcttttcaatacacttgttttcttttcttcatcactataatatatccaaaaaaataacaattgcaagtcttatacactaacttattaaaaaatattatcatcgcttaaatagcgatgagccgttgtctcctgtaaattgatcataatgtgaagaagccatttcaataactgcttgcttgtccaatccttgtgcagcacaaaacgaaaagaatgcagcagataaaatatagccgcgttcacgatcatctgtcaggttatctgagaacttcatattaatcgaatgatttgcataatccgttgtcaattcaatcgatttattttctggtttactactcattctattgcaacctcttttttgttctaaaacaaataaaattaaaaattcccggatttaaaattgaagtgcaacactaagtgttaaacaaaaaggccatgaagacctaaacttgaagtgacgaaaaatcaagaaaggaagatcttcatgaccaattcaaattctagcatttctaagcactatcatcaattaaccagcgtacaacgtggacaaattcaagcaatgctggattccggcataacttcccgtactgttatcgctcaagaagttggctgccataagtcgacaatcagtcgcgaaatcaaacgcggaagcgtcctgcaaagagacagcagctatttattgtatgagcactattacgctgatactgcacagatttattatgagaagcgtcgcaaaaactgctatcagcgcaatccattgaagcattatgctgtctttttgagaatgctctccagacgctttaaagctaaatttgatgccaccagcatcgatgagttcgttggtgaattcaaaaggactatgccaggctacccttgtcccagcacaccaaccgtctatcgctatattgatcagggcttgctggacataagcaatattgatctgcctatgaagctcaaaagacgcaggaacaagcgtcatcacagccatggcggtcacgctttgcacaagaagcatcttggcaattccattgaacagcgtcctaaggaggttgaagacagaaaagctccgctgcactgggaaggagatctggttaaaggcgtcagacgcaagaatcagcctgctttaatgactttgactgaaagaaccacacgctttgaagtagttatcaagattcctgactatcgggcaagcacatgccaaaggctgcttcaaaaggagattgacagacatcctgcctggtttaaatcaatcacgtttgacaatggctctgagtttgcggatatgaccaagatcaagggctgccagatttactttgctcacccatattctccatgggaaaggggcaccaatgagaactgcaatggtcttttgcgtcaattcttccctaagggcaagagcatgaaagacaagtcaaaagcttatgttcaacaggcaactgatgccattaaccacaaatatcgccgaatcctccaatatcacacagcagaggaactcttcaagcaatatatctcttcataacctaactgttgcacttaatttgacaattcaggaaaattaaaaatttaaaaatttctattataattatattacaaaatcaaaagaattagaaagcgtgtttttatcaatgaaagtttcaacttggcgctcatcatgcacctcaattttaatcgggaaaaaggcctctctttctggcagtatcatcatcggtcgtaatgaagatgctaagactgcttggcctaagcatttagcctttaatccacatcgagataatgtacagaaaaaccattttaaatccaaagacaataagtttgaaatggatttaccaacagctagctactcttattcttcaaccccagaatggacagataagtacggagtgttcgaagaagacggaattaatgaatatcatgtagcaatgagcgccaccgaaagtgcctacgcaaatgaccgagttttagctgttgacccctttgatactgacaaaggaatcttagaagaagcaatggtcaccgtagttttaccttatgttaaatccgcacgtgaaggcgttcagcgcttaggagaaattgtagaaaaatatggtgcagcagaagctgacggaattctctttggcgatcgtgatgaagcctggtacatggaaatcggttctggccatcattgggttgcacaacgaatcccagatgattcctacgctattgtcgccaatcaactagctattcaagaaattgattttgccagtgacgacttcatgtattctcaagacctgcaaaaatttgtctacgacaataaactctggcctaaaaatcagccattcatttggcgtgatatttttggcactcatgacgatagtgacttacactacaacacaccacgagtatggagcggtcaacgtctgcttactccatctgtagcacaagaacccgaaagctttaacctgccatttattcgcaagcctgatgcaccaatttctgcgcaagacgctcaacgcgttttaagcgatcactacaacaacaccgcctatgatttaaccaatcagaaaaacagaaataatgccactttcagacctatctctgtggctactactcaggaatcacacttgcttgagttaaacggtgaaaacatgattcactggctagctatgggtgtggctgcgcaaagtgtttatgtgccattctatcctcaaggcactaaggtaccaaatacctggaaaaatggaaaagaaacctactcaccaaattcagcttactgggtctttaaactggctagcgtcctggttgatcgtaattggggtaagtacggcaccgctttaagcaatacgcaaagtactactaacgaaaaattgcttcaaattagacagcaatatgatcaaaaattagcacaagaaaaggatcaagaacaacaaattaaattagtggatgaagccaatgccaaattagctaaaactgctactgatgcttataaagaattgatcgctaaactaatcaccgaacaaactggtgactcaccgttgcgtttccaaatggatcctaacttataaacaaaaatgcctcaatgaggcattttttcttactattttttcttagtcattaagccgtccatcatttcataaatatggtcggcgtatttttctagccgcggatcatgcgttactagaataacggccttgtcacgctttttcgctaaatctttaaacaattgtcctacttcttccacattttgcgtatctagcgaagcagtcggctcatcggctaacaaaatatctgggttagcatataaggccgtcgcgattgctactcgctgctgttgcccaccagataattcatttggatacttattaaccagcttttcaatccctagctgcttgagtaagccttgcaatttatcttgcgacaaattattttgcttttttactttatcaatcaaagtaaattgctctttaactgtcaaaaatggaactaaattataagcttgtaaaacaaagccaattttattcaagcgtagttctccactttgcttagcagaaaaattactaatgtctcgaccattaatcaaaatttcacctgaagttggtttttgcaaggacccggcgatcgtcaaaaatgtacttttaccggcgcctgaaggccccataattaaaaccacttcacccttattagcctgaaaattgatatctttcaaagctgcaactttagcttcgcctttaccataaactttattaacatcttttaattcaattactgccattttactcaccaattgcctttgctggatcaaccttcaaaattgatctaatcggaatcaaactaccaataatacccatgactagcatccctaacgtaccactaatcataattgctggcgtaaaagtcattggcacagctgctggtaaagttaaatcagttaaccacatcaagataatcgcaattacaacaccaatagctactaaaattatggattgactgatcgttgcaccaactaaagttttacttggaattccttgagcccgcataacggcaaaattatgcattttttgcatagttaaaatatataggaaaacagcaatcacgatcaaagaaataacaaataagaatccaatcatcaattcaaaagttaagttttgagccgtatatcctggaagcttattaataaaggcttgaattgggtatgtcttggcatccttataattgaatttataattgctattctttgaaacaactgcagaagcggctacattaggagcgaccatccgcagttttttccaagttttcattgagccataaacaattggcgcaatattaatcttggcgttatttacaaaaccaacaattttatattttttcttagagccattcagagaaatttgatctccaagcttgtagcctttgtctttgaaactactgtctactgtaatctgattaccattctttgcttttttcccagcaattatatcttgatcttgataaataaactggtcttttttgatgcctaagaattgagctgaaattgagttttttccctttttcttaactacaattcctaattgaccaataattgcttcattcttgccaatttttgcgttttttaaatcgtcttttgtcagaattgactgactcatgctgatattggcatttttatttaaaacaatcttttgcgcattccaattttcaattgcttgtgtattctgacttgctaacccaacagccaaagatgacaacataaaaattaagtagctgatcaaaaagatcatcaaaataatcaagccatagcgcaatttttcatgcttaatttctttcagtgctagaaacataactacatcccctttgctagtatgtccaggctcttcttatagcgcgccaagttcttttcctgattttcgggatctgataagcataagttgataacttcatgactaagtaccatggcactccacaattgtggccccatattcaacaattgtcttgaataaattttgaaattatgtggtatcaagtactcattttgcgacatatgcaatttcatcattggttcatatttactgtattgaactttatcaataaacttaactactcttgcataaaaatgattaggatcaaatttttcattaggactcatcccagcatgaatgtcttcaatagcgatgtgatacatataaacatatgcatcaattaaatcatcaaaatatttataaaatgctcctcgagcaatgttggcattcttaacaatatgtgacaccttagcatctgctaacggataagtgctgaattcttctaacaacaccgcttcaatacgtctacgtttagcagacggtaaatttttaaaagtttgcttaaccattttgttttccccttttccaacacaaatgacgacttgtcatcaattacttatatcatagctgattttgacgagttgtcaatacatatacacaaaaaaagaaggcctctgccttccttctctaaactaaaactcgattatagtagtacaacctagcaacaccatcacggacgctaaatttgcttaatgcacaattatttggcgtatctatcttgtccatgtcgccattactcaaataatgagctgccatcattcgaatcaaacgaccatgtgccactactaataccttaccttctggatatttttgatatatttcgtctaaaaagttagcgcaacgtgcttcaaactctccgtagccctcaccatttttggcatatttaacatagtcgcgagtaacttttccccatggatcaacgacatccggatattccttagcaatatcatccatcttcttgccgtcccaatcaccaaaatcaaattccagcaaacgtttgtctaaatttaatttctttttacctttagtaaaaattttcgcagtctctactgctctcttcattggactggaataaacaacatcaaatttattttcatcaaacttagcggcggattttttagcatattcacgaccaaattcattcaagtctgcgtcaacttgtgcgccctgaattcgattatctttattcacgtctgtttgtccatgacgaataaaaactatttccattttttacatcaccttttcttaaaatcatacccttatttaactaatctttccatttctttactgtttttttagcgttttgaaatttaaaaagcttaaaatataaatagataattagaaaggggaaacattatgtcccgcgttacaattgaaagagatggtctcaccttagtaggagaccgcgaagaaccattcggcgaaatctatgacatggctatcctcatgcatggttttaccgctaaccgcaacactgaattattaagacaaattgccgatgatctacgcgacgaaaatgtcgctagcgtccgttttgactttaatggtcatggcgaaagtgacggcaagtttgaagatatgactgtgccaaacgaaatcgctgacggcaaggcaatcttagaatacgttcgcaccgatccacatgtacgtaatattttcttagttggtcattcccaaggcggtgtaattgcatcaatgcttgccggtctttatcctgatgtgattaaaaaagttgtccttttagcaccagctgctcaattaaaagacgatgcacttaaaggtaacacacaaggcgcagtctatgatcctaaccatattcctgatactgttccactagtcggcaataaattaggaatgaaactaggcggattttatctccgaaccgctcaagttttaccgacttacgaggtctctgcccgctttagtggcccagtatcagtcatttatggtactaatgaccaagtagttaaccctaaatatgctaaaaaataccatgatatttatgaaaatagcgaacttcatgccattacggatgtagatcacagattcactggtcaatacaaaaagtcagcatcagatttaactgctcaatttttaaaaccattattttagcgccgagtaaagtcgaactcagtacgaaagacgtaatgatccttagtacttacgtcaggttcaaattgaaattcaaaatcattaaagtcctgcaaatctgtgggattttttatttgcttctcggcaatgtagcgcaccatttcaccacgagccatcttagcgtgaaccccaacggtcttccacttaccattttttagttcctgaaagtcaaccgtaattaattgtcgtccttgactcaaataaggtttaaccaaacgtgtatattgcttggaagccaaatcgataactatattatcttcttgaaataaattttcagcgatatcactgccccagaaataatacaagctataatcacgaaaaccaaccattttagtatttaattctaggcgatatgggcaaacaccatcaaaaggccggagcataccataaaatcctgatagaatccgcaaattcttttgaatatagtcaagtgcaggttgtgtaaataaatccggagccatatattggtattgaattcctgaaaaagccaaaattgcaggggttaatcgttcatccaaattcatattttctagttgcaatatgctttgcttagtcacattttcactagcatgccaaaggtcttttaactgttcatttgaccttgacttaagaaatctttctagaattcgtgtcttatccaagaactgcggttttgactgaattggaaatgaatcacgatcaattttcataatttttgcaggtgcaataataattttcatttttagattttgttcctttacggtaaacttaaattgtgattaataagtcatgtggtaataagtcaaatgaaaggcgatgatatttgttctttttgatcataaatttgagtatatgaaactaagccttggtaaaggttgattttttaaatgttaaacttttgtttacttttaaatttagaccaatttttgaaattaagacctcggtgtcctgtacagtttgtcatctttgagcaatttaaagataactcgtactaattttcttgcagttaatgtgcaagcacgtttatgcggcgagtagacagcttcatcatacttcttttggtaatattttttgaaaacaggatcatgtaatcttgctagattggcagcttcaatcaagtaatatcttagatatctgtttccagtcctggccattggagtatgttcgttgctgtgatctcccgattgatattgattccaggttaggccggcatacttagccagctgttcttctttatcaaagcgatcgatacttccgatctcagcgataataccagctgtataggttttgccaataccgggaattgattccagaattttgctttctggtaatgcatcaacgatacgatcaattgctttttctagatctttaatagattcattaaagctttggatcatgttgtaatgaacagaaagcactgcatcaattgaatcagtcattactttgcctaagcgatatgaacctctaacagctttcttaattgctttagccaaggtatctggatcggaaaagcgtcctctgcctttaacctgtaagtaagaaattaagtcttcggtaggcatatccgcgatctcatccagagttttactatcggttacaatagacatcattgtagcaccgaaaagaggagtattaatcttatctttatcgacagtgattagtttattaacccgataatataaagcttcaatgaagtgctgtttggtacgagtcagttcttgaactaattcatatctggtacgcgttaaacgctctaaagcaagatagttgtcttgtctggcaatgcttactcgataatgtccaaagcttagatacaaagcaatgtaataagcatcgagaggatcagttttactttcttcaaagactttatgaaacctgctggtttctttggggttaattacatcagtctctacattgagcttttgtaaatcttcgtcattttggaaaaagtaagcaggatgaaaactgtaaatagatgtagcttccatgccaataatgatttgatcatagtgtttattttgagctagatctaaaatttgttttttcagttcactagcaccataaagatcattgacaaagctatcgttaattaagcgtttgttttgatcttctgaatcaagtgcaacgacctgtaaatctttagaactaacatcaataccgacaaataatttcattggaaatggcctcctttctttcaaatttctgatcatagattttgatcttcacatgttaacccctaattacagttcttaagttcaatctcgccagtataagtattcactggttgcttctttgaaagctgcacctaatcccaattgctcaaggactagcaaaaagaagcaatcaatacagcatgtgagttagagcataaaggaactgtctgggtggcagacttataaagcagacaaaactgcaggaggtgataacctagaccagttgaccaaagccaatgacaattagaggctaacatgtgaagatcaaaaagcaaatactaatttgattaattatcacaatatgactaattacaatttatataatacgaggaggaaaaataatgaatcctgattttgcaattgtcttaaattatcaacttaatgataaggctgatgccgactttttagtaaaaacagcccgtaatatcggtgctcgtgcagtgatgactgacaggcaaactgaagatttcaaaacagcttgcgctaagtatactatttttttagctaatccagaaaatagtactgacttaactaaggataacgtcattgataccatggtcaataaccgtaaagctggtaagactacaattattaatgtgcccgttgaagcaggcaagttttctgccgcaactcaagcaatgctggatacgatcaatgattggatgcaccaattcggtcacgccttcaacgaaggaaaaactagtgctttaaccagtagcgatggctttattttagaaaatcgccacgcaaattaccaaaaatatgtcttcttacctagtcctcttcctgacaaaatcgtggtagaaggcctagtcgaagaacctaaccgggtagaatggattgaacatcgaactgatcttgattttaactataaggatcaaaaattaactattaacttagtcaaaccagatgatgagtttgcttggcaagtgttgcgaattcaagcccaccgacctgaagatgacattttagaaacgaaattttagtaaaaaggcgttctttgtagcagaacgcctttttacaaccttatgtaattgctatttctattttcaaaaaaatttattcttgcttaagctttaactactgaaccattatcaaaaaattctctaaaacgacgtgcttctttatccagagtaatttcatcattaacttgcgataacttatagccaacaaaataaggtggcgcttcaaaacgtgtaatatatttagcacaaataccgtcatcattacgcggataaaagaatagattataagaatcgcagcggccattatacatgatatttaacaaatacttggcaccactttgaatccagtcagcccacaagtcaatgctatttttatctaacaagttaatattgagctcagtgtagccttgaacggggtgttcagcaatgttaacttctaccccacttttttcaaaaagggtctcaccttcaaaattattcgggtgaatatatttatagccatcttcatgttcaaagccaactatctgcatatgcgggtgaatcaaggaaccacctgaatgtggaccatagttcttgtaccaaacaattgactcatattggtcactagcctgcactttttcaaaacaagctagcgcaaaatgcatcaacttgcgattatgttcctgcgtataagtactaatatcgccgttatgatcactagattcaattagtacagtctgccaggtatcgcgcaaggtcgggaacttattcttaagccaaatcatgtcatcttccttggcgtaaatatcagttaaattttcaacatcacaaaatgggcaaacgtttttcttcttatccttacgataagattgcggtttgcctttagcaatgctcatttgaaaaacaagtggatcattagtcatatttattcctttttttatttaaaatagtttaaaatctaatgggtaaagttttactataatgtaaaatattttgtagctttactagcataaaaatacttgttatactttgttaaagcaaacgtttattcgaaatttatcaagagacgggttttaataatgcaatctagaacagaaatgagaaagcgaaacaatcgcaacaatctctatcttattattattggcataattgtcgtaattgcaattatttgtggctttgtcattcataatcaaagggtagctgctgaacgtagccagcgtgaatatgcttctacccacttcaaccctaatgtaacaatttatggtgtgcaagtaggcaagcttactgttaacaaggcgactgctaagatcaataaacaagctgataatgtcgtctttttaagaaataaaaagattattgctgaaaaagacgacaaggttcaaactatcagccaagctgaagttaaaaatattttcactaagcagcatactgatttgccaagcaaacaaaaatacgttttcaaatccgccaaaatagatgaagcaaaaaagagtttgcaaaaaatacaaaatgctgtagtcacctataagatcaatggccaggaattcaagctaaaagctgatgacctaattcacgaagttacttacaaaggtggtaaatataaattcaccgatgtaaaaaaactgcatgctaaaatggaagcgatcgatcaagaagtcaaaactctaaagaagagttataaatttactgttcctactggtaacaaagtcaatggcaaaacgattacggtaaaaaacgaaagctatggttggggaatttatgtcaagaaggctgtggctgcagtagaaaatgcttttattaatggtcaagatgttgttggtggtagtaagtatatttatggcgagggttatagtacctatgctcatggttatggcaagagcaatcatggtattggtaaaaactacgtcgttgtctccatcaaaaatcaggaactatgggttgtccgtaaagggaaagttgccgttcacttaactgacgttgtcacaggtactgaaaataagagtaacgctactcctaaaggtgtttggtatatcatgtacaaagaatcacctagcgtattgcgtggttataacgacgatggctctaagtatgcctccaaagtacaatattggatgccatttactttgagcggctgtggcttacatgacgctagctggcgtagcgattggagtaagtcagcctatcttactggtggctcacatggctgtgttaacattcgtccagctgaaattagaagtgtttggaacaacgttttaactaacgatgctgttatcgtatattaaaaaataaagattaatcgcctacttcaattgaagcgggcgatttttttgcgtaaaattaacagaaaagatatagatttttgaaaggatcaaatatgttagtcatcggtattatttgcttggtggttgctgccatttcttactttaaataccttagtgaaaagaacggacaagctaaccaaaaacaagctgaaaacaaaaatgaggcaaaatggcagcgcactttagcaatcattttcctcgttttcggaattttattaatcggttattggattgcattacgctaaaaaagacgtgaattttcacgccttttttaaatataattgattaccacattacccatattagctcttccctttaaaactaaggtaggaccgccgccattgctttttcctttaactattacattaccaaggctaatgcttaattgattatcaatctgccatgataagggaacgtagagatttacatttcccattgaagcagttagattaagcacgactgtatcacctgctgctttagcatcatcaagatagatattggcattaccgaatgaagcttcaagattaattgactgtaaattttgtgaatgaatataacgtgaagaatcgccagccatcttttgattaattacgatattgtcaccatcttcaatcacatcttgaacatgatgatgtgttacttttgtctctgtatcagcatcgtcactatcatcgtcatcattccaatgaaaactcttcttgataacaatttccggatcttttttaaaaagcaagctcaatcccattgaaacaagcaaagcaataaacaaaatcatccaagaggataagaactttttaatgcccaggggacctgcataagtaattactaaaaaagcaattgagaaaacggacaccacaatgctcttatcaagcaagcccttaattaagcaagccacaaaaatgactgtcaaaataattgtccaaacgctaattttgaagcttaataagcctaattgactgatcaccaaaagcgcagctgcagcgattagtcctactccccacaaaattcttgcaaaactgtttttcattataaagaccttctttcatctaagcgtgtgcgtaattctttgtagtatcgacgggatgcatatacagttttataagtatcatgaaactgtatcttgcaatctgaaatcgaccgagttaaaccataaatttgatctaaattaataattgtcgatttggaaatccgcatgaaacctgcgcccaaaatattttctaactcatacaatttatgtttaaccaagtatgccttatcttgtgtatgcaaaattacctgcttggcatctgtttcaaaaaacaaaatctcgttcagtggtaagtagtaagaaacattgtttctaaaacattcaatctgatcattgtgttcaataccttgtaatttcttataaagctgctctatttccggagaaatatttttagctttaataatcagttcatcttctacggcatctggatcaatctcaagttttactttcatgtttctcactcccttctgaatctgatatttatattaaaaaatatttcagatagcttttccatagttttgaactaagtggtaacttttggtttctaagtggcaaaaaaataagacgacctctgtcgtcttattgcttattatcaatgtaaactagtaaaaaatgttatcagtccaagatttgattattttttgctttctactgcatagattaatacttaatagaataatatatgagcactactataaaagatagtatgacaaatacgctagccaacgccataaatgaaacattaataattatcacgctacttagctttaagtaatgttgactcatcacaacgatgatcatccataaaccgatgtttaatactacaaaaaactcaattactttaaagtttaaaacagttacattatatttttgactagatatcttattactcttataccccagtatatttatattctggttatgctgaattgcacgtatgaaatattgggaaacatatactaaaataacttcagcaatactaaacaaacctagaaatatattgtgaatccacattacgtttatagttaaaatacaaactatggccaataatgcaattatccaaaaaagtttgtttattaattgatatgctaagtattttatatatttttctctatccattaatctttacctttgaaactgtcaaatcttttgtgtaaatagatctttctcgtaaattgattttttaattatttatttaatcaaagtaggattctaaggtgtcctgaacctgaccaaagcctttatgaattcgattgaaataacggtcattgtagctcattgcctgaatgccaataaaagcatcaagcgactgttcagttggaaactctgccttaggcttagctttgcgcttgatcacattgttaaatgattcaatcatgttagtcgaataaattgaagctctgatctgcttgggatagttataaaagaccagcagatctggttctatgtctttcaagcttctgataacatggctgtaaaccttgccccatttggtatagaagtcatgcaggacagctgtggcttcttctttgtttgtctgttgatgcacctgtttgaattcgttcatgatcttttcacgatcgtcgacgcgtactttagcgcagatattgcgcatgacatgaaccaaacagcgttgaaaatgagctttaggataagtcctggccaaggctgttttcatgccaacaacaccatcagaaagaaaaagctcaacttgctttaagcctcgggatttcatgttttgaagcatatctgtccagacttcaatgttctcgctaggcgcaatgcagtagtcaatgacctccttgtgcccattaggcttgatgccaatggcaatatagactgcttcacgctcaaatgtttctcggcgcaaaggaaggtatgtcgcatccaaatagacgcagaaaaacttgtcgcttagcttgtggtaagcctcaacctttggaatcatctgcttggaaatatttgatacctgagctggactgtaatggctgccatacatcttttcaattagatcggctatttccctggtggtcacgcccttggagtaaagcttgataatcatgctttccaagatatccgagtgctgcttgtagtcaggcagcatgtgctgatgaaattgaccgttgcgatcccggggcacttgcacttcaattgggccaaattgcgtatcaactttgcggaaataagcaccatttctagagttgccagtattccagccatttctggcatagggatcatagcccagaaaggcagtcaattcagcttctaacaagttattaacagcctgttgtagctctttgcgcaataaatcatttattttgtctggattgaatagagcttgagcaaaatctttggtaaaatcattcatgaaggagttcttctttctgtatgtgtttttttgttcaaaccaatcatacgagaaaggaactcctttttctaatgtttaaagaaataaatttaaggaatcattcatccttacacaaactattttacagtctcttaactaaagattgataaaaagaaaatataaaatataatgttaacaataaatcacaaattctaaattttacttttgtaatcaaataaaagcttaaataatcaaaaaacacccatacgattaaactaaatatacttacaataagcgttactaattctaatttcatatttccaccgttaattagtatttttagcacatcttaaataaaccgactatctttcagtatagcatcctcagtttatatgtaacaaaaaaggattctatccaagtagaatccctattttagtggacaccctccattagtacattaatcttcttaaccaagaaaaacataatcacggcaaaagctacactaactaagccaaccgccatgaaatattgtacttcagtgccagttgaatagaacttaacaatttgtgcattcactgcttgtccagttgcatcagccatgaaccacatactcatcatttgcgaacgatatgcattaggggctagcttggtcgtaattgataaaccaattggtgaaatcaacatttcagcaatttcaactaagaaccatgaaccaactagccaaaatggactaaccttgcttgctgtaccataaagcatccctggcaaagccatccacatataagatagaccagcaaaaactagccctgctgcaaacttgcctggagctgttggctgctttttccaatgttcccaaagccaaacgaagattggcgttaaaatcataatgaataatgggttaagagactgaaagttggctgctgtaaagtgccaattaccaatatgaagcacggttctttgagcggcaaacagagctaaaactactgagcctgattcttcaatgccccagaagatagctgcagcaaagaacaatggaatgtaagccttaactcgtgaacgctcaaccttagttacttttgaactacgtagcatcatcacaaagtaataaattggcagtgcaattgctaaaatagtcaataaagtaatgacattgtcaacgttcaattgaccaaagccggccattgcagctaatacaagggcaatcaccacgaacccaataactacccacttaataatattaagcaagtcacccttatcaataggatcattaggcgtcaaactttcaggagaaaggtattttttaccgccccaaacatattgcactaagccaaagaacatcccgattgcagctaaagaaaagccggcatggaagttcatttcattaccaaaaatatgaaagccaaaaccttgtgctgcccatggaactaaccaaggtgcaagaaatgatcctaagttaatcccaaagacaaagatgctaaaacccgcatctcttctgcgatcttcaactgaataaagaccaccaaccatgtcagatacatttggctttaataaaccagtaccaaccacaattaaggcaattgaagcatataacgccgttacaccggctggaagtgccaagacaatgtgacctaacatgatcaaaacgccgccataaaagacggtttttcttgaaccccaaacacggtcagacagccagccaccaactagggttgataaataaacaagtgaaccatagattgacatgattgatgcagccgttgtttggtccattcccagaccacctttggtgactgcataatacatgtagaaaagcaggatggcgcgcattccgtagtaactgaagcgctcccacatctcagtaaagaataacgtggacaaaccctttggttgtccgaaaaatgctgtatctgaatctcgtttacccaaagaaaaactcccctcttatctaaggtaagcaataaaggatattataccacgaaaaataaggatctacttcttacatcaatgtcattaagttaagattgacaaattgaatctaatctctgtagaaccgaatcattatgatttagttctttttttgcataaaataaaggcgaaaagaacctaccttttcgccctctgattaaattattaaaccttcaaaattattgccagaaagctggtgttaattatgaaagcccttcataaaaatattttagatcgtcttgatcaaattatcaatgatactggaaagcatattcatgattttatcgatgatcctcatgccttcactaggaagcggtctttagatgcagctacagtcattaaaactactattaatatgcaaggaaaagatttgaccagtgagttgtttagagcttttggccaaaaagctattaaaaataacgataaagtagtcagtacttccgcttatgtccaacgcaaaggttcacgccgttgacatgcacaagactgacctggacggcaaggaactgaccagctacaagctgcaaaaggacctgcgattccacttcgacaactagtacaataacagaaattagccaatatacagcaaagtgtctgggaagaaactcgatttttagcccggatataaaaacacagaaattcattatttttagtgaattcctgtgttttttgtttttgaaatgaaaattcgaaggcttcaccttcttgttggctccatattttttcttaaatgcgttctgcgcataccaaatacactcttcatgtgcccaaaaattggctccacatctgacttgcgacagccatagatgcgtttaccttattcgctttgaagagtctcttttgctttttcttttaaatactgccaattaggattgtagtgaatctgtctttgtcgacctgttttggttttagccaattgggtcagttcttcagttagctggaactcatcagcttcataaattttgaagtttctgaccatgccagtaaatcgatcttttctttgactataatatttgaagttgaagcggacgcctgatttatctacgtaatagtcttcttcttcgttatagtaccagttgtcgacctttgatggatctttcttatattttcgcgtttgttctttttcgtattgggtatacggaatctgatagttcttatctgaataattctcttccagaatcgagtaattgtattcactgccatagcccgcatcggccacaatattttgaaacttatcgaaaattcctctggacttcatttgttctagaaatagttcgaatattctaaagtcagccggattaggaaacagggcaaaatcaactatatattgattagtagtcgctgcctgaatattgtagcctggctttagctgcccgtttttcatatgatcttctttcatatgcatgaaggtggcatcatgatctgttttagagtagctgttacggccagcaaagatctcttcagcttcttcgtactttttagcacgcggaataaaatcttttctaagtttatgtgcgatcttctttaattcacggcgcttggccttattttttgatccgcctggaatggctttaggttctcgatcaattttctcggtcagcttctcaacttctttttccgtttcttgagccagaatctctaagccttgactagtttgggcttcttcttcggccatggctttgactacttctttattgatcagttcttcatataaagcagacacgtcttcctttaacttggcatgatacttctcaatagcttttcgccagacaaaagtgtacctgttggcgtccgcttcaattttagtaccatcgataaaaactgcattttcacggattaatccctcatcttctaataatgaagtaaagtagacaaaacactgcttaattaccttattggcatggtcgcttgatctgaaattattgatcgtgtgataagaaatctttctattgtcagctaaaatcatcatgggcagattctcttctagcattctttcaatttttctgcctgaaaaaactcttctagaataagcaaagagtaaaatcttaagcatcattgccgggtgatatgcaggtctgcctgtattagaagtggtttctaagataacttcgttaggaatagaatcaacgaattcactgataacactggcaatgtgatttgcagggatagaaaaatctaaatttaatgataaagtagtttgtcctgtgatataattttgatacatgtttaagcccactttctattgtttttttgtggtgattaaataatatcaaggaatgggtttaaagtatacaaaaagagcgatgacttcttatgaagttcatcgcttttttcatggcctggaaattagttttttcccagacactttctattattaaactagatcatacatttctggcattctgcaccattttgaattaaacattcgtctgcagtcaagttctcactaccagctaaaactttttctcttattctaacataataaattgagttgcatcgctttttaaaggcataaatataagccttatttaaatctcttgttgttgcattatcttcaacaaataaagttaacgaaattgattgatcaacatatttttgtgcagcagctgtaatatcaataatagcattaggtcctacttcatatgcgcccttttcgtaatactcataattgtctttattaatcttataagctggtacataaattcgacccaaatcagcctctttgcgtgtttcaacaggagctactactggctgcaaacttggtgtacatgaagataaataactaattgatccagtaggtgcaactgctaataagttagcattagctatacctgtctttttaattttagtaatcaattcttcccaatcttctttagttggaataactaatttatatttagctacaatttctttaatcttgtctgttttcggtgagacttcctcatcaataaattttttgaaataatcaccactagcatatgatgaatctttgaatcctttaaaagcaccatacttttcagctaatttatttgattctttaaatgcatggtatgcaattgtataaaagaaaattcctgtaaattcaactgcttctggtgaatcataataaatatgattagttgctaaaaagccatgtaaattcattgctcctagaccgattgctcgattagctttatttcccttttcaattgaaggagcacaatctaaatctgaagacctggcaacacgattaagcgcttgaacactatcagaaaccaaactacctaacttgtcagcgctattcattgctgctgcaatattaagtgatcctaaattacaacaaacatcgtagcccgtcttattaaaacttaagtcttcattataggtacttggcgtattaacctgagcaatttctgaacataaattagacatcacgatccgccccaatttcttttgtgggtttcttcgatttacagtatcttcatacataatataaggataccctgattcaaattgaacttcagcaatagtttggaagaattttctagcactgataaatgtctttttaatacgtggattattaaggagattttggtattctttagtaattgaaatatctgacattggtttaccatattcacgtttaatatcatatggtgaaaacaaagccatctttttattttctttggctagttcaaaagtaatatctggaatcactacgccaagtgataaagatttaattcttaccttttcgtcagcgttttctcgtttagtatctaaaaattgcataatctggggatgatgggcacttaaataaactgcaccggcaccttgtctttgccctaattgattggcataagaaaatgaatcttctagtaatttcattacaggaattatcccactagataaattcttcatttttttaataggtgcacctaattcacgcaaattagttaagcatagagcaacaccaccaccacgtttagataattgcagacttgtgcttattgctcgtgaaattgattccatattgtcttcaactctgagcaaataacatgaaatatattcaccgcgtctctttttacctgcattcaagaaagtcggagttgctggctggaaacgattactaataatatctttaactaaattcaaggccagttcttcattgccatcagctaaaaataaagcattcataacagcccgatcttcaaaacgttctaaaaattgtttattatcgtttgtttttaaggcatatgctttatagaatttagctgcacccataaagttcaaaaagctaaaattttgtgcataagctaatttgaaaatttctttaataaatttagctgtatataaatctagaacttttttatcatagtaatcattatcaactaaataagctaatttttcttctaaagaagcaaactttttcattcttggttcaatatgattttcaagatattgcttagtagcctccttgtcagctttaaaattataatttcctttttcatctttaaatttagcaagtgcatttaaagaaatatatgaatcattattaagattatcagtcattgtcttcacctgcatcagcaattattttattaacattatttacatcttcagttgttcccagtaactcaaatttatatagataaggaacatgtaatttcttagaaattacatcccctgccaaggcaaaagaattaccaaaattggtatttccactagcaataacaccaatacatttttgccgattagccaatttgttcaaaaagtggataacttgcttaggcacagcacctgtagtcccatggccaccagaataagttggcgtaattaaaatatattcttcagaaactgaaatttctttactgagtttaataggaatcctaatagaattacaatctaacttttctacaaaacgtgctgtattatttgaagtggaagaataatagacaactaatggctttttagaaatcccagtcatcatctgtagtctcctctcctgttcccattacatatgaagaaccattaccagaaaagaaatcatggttttcatcagcttgagctgataattgagcgaatacttctggagaaacataagtttcttctgcggtaaaaggagaatcatagcctaaattttgtaaaaatttacctgcattatacaaactgaaatgaattgcatcatcaaccaaatcaaaatcatcataaagctcgtgcaaatatttcttttccaaatcaattagtttatctaagaaatcaaaaacaaattttttcatttctgcttgtttagctggagctaatttctttacggccaattgatatttgtaaccgctataataattgtgaataaccttatctcttaagatcaatctaataatatcagcagtattaggcaatttacctcttgcagctaaataaaatggtaaataaaaaccaccataaagcaggaaccctggcataattgctgcggcgacctttgatttaagcggatcattgcctgtataatacggaattaccgctttagctcttgcttgtaaagtatcattattaactacccattcatgcgcttcttcaatttgttcactagtacataaagtagaaaaaatagttccatatgatcttgcgtggacagcaaccataaaagcaaaatttgcatagatagcttgctctatatcagtttgtgaatttttaatttgggctacatcacccacacttgattgagttgtatctaataaagtcaatccagtgaaagtgcgagttataagctgttgccagtcatcagataattgattccaagaacttatatcattcgaaactgggattttttcaggtaaccaaaagttttgagtaactctgttccaaacctcaagatccttatcatctttaatgtcattccagttaatagctcgcatatttttgccgttgtcattgtaagcaaattcaactggtgactgtgaatgatcataataactcatatatttgctcctatcattatttattgttttatctaatatatgtgtaaacatactatagcatcgtctgctcaataatacaacatgtggatttttggggttatttataatcgatatattgtggttaagccgttttgataatacaaaattattttcaaatttattttatcttccaaaaataatgtaggtgttgttttttgcttttttgacaaaaaaagtgtctgggaaaaaagtcgatttttaactaaatttaggctttaactcaaaaaaatcccattaaatcaaggtttgtatgtaccaagatttgatgggattttgaaatttctgagttttttcccagacacttttttcatggcctggaaattagttttttcccagacactttcttttgcgatttttgctttatttgttagtaccatctgctcctactggcagggccgggaaaataaccgtgaaggttgaccccttgcctaattcgctttccaggcggatggtcccgtggcactgctgaacagcatgcttgacaatggacaggcccagaccagtgcccccggtcttgcggctgtagctcttttccacccggtagaagcgttcaaaaatccggttctgggcttcctggggaatcccaatcccagtgtctgctacctgcaggatcgcctggccccggtgctccttgaccgtaatcttggtcttgcccttttccttgttgtagcggatgctgttgtcaatcaagttgtaggcaatttcataaaccaggcggaagttggccaggatcatggtgtctgacaaattggtctccagcttgattccatgccggtaagccgaaccctgcaaggcttccaaggcctcagtcaccggactcttcaagttcagcttgatttcttcaaagcgctggttttcatccaagtgggacaaacggatgatatcgtcaatcaaggtcaaaagctgggcggaagattcatggatcttcttgtaaaagccatcccggtcttcgtctttgaccaggtggttttccaaaagctcagctgaccccatgatggactgcagaggcgtcttaagttcatgcgacacattggccgtgaattcccgccggacctgctcttcatggtattcttccgtcacgtcaaccaccaagatcgaagtccccttcaaaatcttgcggctgataatcgggctggcactgatttgaatattgcggccgtttctttccacaatcccctcagtatgagccaagcggctgtttttatcgatgatttccttaacatcgtctggtaaggggtcagtgtcatgcaggcctaaaagtgaaactacagccgggttagacaaaagaatccagtcatccaggtcaatcaagatcaagccttcttgcatggcatctgttaccgtctttaattccttttcccggtggtgcagctgctccatttggtcagcgatctgcttgttctggctgtccagcctggtcaagagcggcttgatttcatcataagccttgctttccaggggcttgtccaagtccatttcattcagcggcttgacgatcgtttgcgagagcgtcttggccaggaaccaggacactaaaaccgccaaaagcatgatcagcaaaagcggcgacaagagcctgagcagcatccgccagaaggagtttctggtgatcgcgatgcggatgaccccgccgttattgagccgttcagcgtagtacatggtcacggtcgacaaggtcgtgctgtagcgctcgctggtccccgtccccttcttcatggcttcggcgacttcctcgcggcgggcatggttgcccatctttttgggattctcttcattgtcgtagagaaccttgcccttggaattgatccaagtaatccggtagttctccccttttaagttcttgaggtacttcttgccgctggtatttaccccgctggccgccaggtcagcctgggaagctagggcagacatttctgtatggtcgaagtcaatgctcaagacaatcgtgcttaagagtacggcaaagaagagaaccagagaagtcagtaaaaaacttgcccgaaatatcttcttaaacattagtctgcttcatggtagcgataaccgaccccgcgcagcgtttcgatatacttaccagcctcacccaacttctgtctcaaggttctcacgtgaacgtctaccgtgcgcgtttccacgtaaaaaccagtctcccagatctgatccatgatttcttcccgggaaaatacagttcccggatgagtaatcaagagctttaggagtccgtattctttcaaagtcaaatcgacctgacggccgttttcgaaaacttcatggcgctttaagagaatcttgatcccgtctttttcgatcttgtcctccttcttgcggttggtccggcgcaaaacagccttgacccgggaaaccatttccatcatcccaaatggcttggttaagtagtcatccgccccgaaatccaggttcttgaccttgtcatattctgccgtcttagcactggcgataatcaccggcaagtcctcggtcgcggaagtatacttgagccggtggagaatttcgctgccgtcttcatcaggcagcatcaagtccaaaatcactaaatccggccggttattgtccaggaccttgaaaaaagaatgtccgtcttcaaagccgcggaccttgaagttcattgcttccagcgtgtacatttcgatttcgcggatgctttcgtcgtcttccacgcaccaaatttcagtcataaaaaatccccttagcctttcttaaacttatttatagtttaccatttacaagagtgttaaggggtatttcatgggattatctgccagtcttgccggtagttacaaataaggaccatttagcaatattgacggcgtgatcgccgattttttcaaagtacttcgcgaccatcatcaaattgatcaaatattccggattactatccttgttaaagttatcgatcaaaaatgccttcgctttgccaaagtcgtaatcgacctgatcatcgcggtcgattacggctttggccagttctacattctggttggccaaagccgttaccgcgtcgttgaccatacaagtagcaatttgggacatgctcttcaggttcagcatgtcatttgcgtctgagaggtgttctttaaggatcagttcggcaatgtccgcgccaatttcaccgattctttcaaggtcgtagaccgccttcaaagatgcactgattatccgcaagtcagtggcaaccggctgctgctccatcaaaaggcgcaggcaggtttcttcaatgtcacgctctgccttgtgaatccggtggtgcaggttaatcgtgtcctctgctttatggtagttgcccgtaaacagggcgtcggttgattcagaaatgctttccttgcacagctggccaatttcttccattgcttcatgcaagtgatccagttccttgtcaaatcttgttctcatttttagcctcctatagccttaaccgaaccggccggtaatgtatttttcagttctttcatccttcggcatggagaagagctggtcagtttcaccgaattcaaccaggtcacccaagaggaagaagccagtcttgtcagagatccgcacggcttgctgcatgttgtgcgtaacgataacgatcgtatagttcttcttcagttccaaagctaattcttcaattttagaggttgaaatcgggtccagggcactggtcggttcgtccatcaacaatactttcggcttgacagccagggcccgggcgatgcagagcctttgctgctgaccgccggacaggcccaaggctgatttcttcagccggtccttcaagtcgtcccagatagctgcttgcttgagggaagtttccacgatttcgtctagttccttcttctcagtaatcccgtgaatccgcgggccgtaggcaacattgtcgtaaacgctcatcgggaacgggtttggtctttgaaagaccatgccgactctttgccgcaggacggtcacatccaggtcaccgttatagatgtcagtgccgtccagcttgatcgagccatcaatccggcagccttcaaccaggtcgttcattctgttaagtgatcgcaaaagagatgatttcccgcagcctgacgggccgatgaaggcagtgacttcgttctttggtatgtgtacattgatgtcatgcaaggcatgaaaatcactgtagtacaggttcagctttttaattgtaattttgtcttccatcattaatttcctccgttattgcgcttgcgcattctgtcagagatacggcgcgtaaccaaagtgaagagcagggtcaaaacgaccaggactgctgatgtaaagttggcaatctgagtggctgacgggttcaaggccccttcagttctcatggcccagatgtgcagggacagggtttcaccgcttcggaacgggttcaggggtgaacttggtgagataaccttccagaagttctgccagttgatgtaagttgactggccggaagtatacaaaagcgcagcggcttcaccgaagccgcgcccagcagccatgattaccccggtcaagatctgcggcatggccgccgaaatcaagaccttgcggatggtttctgacttggtcgcgcccaggctcagggaaccttccttgtattccaccggtaaggaccggatggcattgttggtttcagtagttatcagaggaatagaaagaattgaaatcgtcaaggcaccggccaagatattccaggacatcccggtccacatgatgaaggccaagtagccaaacaagccgataacgatagatggcagggatgacaaggattcgatactgatttcaaatattgtcaggaacttgccttccttggcatattcagccaggtaaaccccggccccgatgccgattggcactgagaccagcagtgagaggaaaactaagtaaatagtgttgaaaaactggttgaaaatcccgttgccggctgctcccaagaagtcccactggaagcctttcaagccgtcaaagatgattgtcagcattaagtagagcaggaaggccagcataatccagccgatggcgtagaagattcccgtcatcagccggtcttttattttagcacggctcatatttatttttccttctttccattgccaagcttgtgaatcaatataatcaaaacgattgagatgacgaagagcaagagagccattgaccacaaagccagattgtattccccgccctgggccgtgttacccatgtcagcggcaatctcactggtcaggttgctggttggtgacaagagactggtcgcgaaggaccgggtcttaccgataaccatggctacggctaaagcttcaccgatggcccgggccagacccaagaccaccccggtcaagataccgccggaagcggctggcaaaacaaccttgccgatgacttgccagcgggtcgcccctaaaccgtaagccccttctctgtagctattcgggactgacttgatggcgtcagcggcgacagtagtgatcgttgggaaaatcatgatggccagaacaattgaggcggccaggactgagaaaccgcccatctttgggtggaaggcgtttctgattataggaaccagcttggtcaagccaaaccagccgtaaacaacggatgggatgctgacgtagatttcagttgccggccggaagaacttttcgccgatttttggtgaaatttccgtcatgaaaacggctgagccgatcgcgaacggcaggcagatgaacaaacccaacaagcaggtttccagggaaccaacgatgtaaatggcagccccaacttttcccccgaacatgccggtcttgtcaagcggtgcccagtcactggtaaacaggaactcccaaacgctgtagtgcgccttaaggaaggtctggctgccttggtagagcaggaaggcccccataaaaagggtcaaagcaacgatcaagaggccgcaggcgatgtagtccgcgcgccagcgcttgtctttggcaattgctttttgaactactttgtccataatgctttatttctccttcttacttattagcatgggtggctttagcggcagccagcagtttggaggctacgccgtagcccatggcttcgatcttcttgctatattccttgctaagcatctgctgcaagaatgccttggcagcaccctggggctggcccttagtgtacatgtgctcatagctccaaactgtatacttgccattatagacattcttcagggttggcttaacaccgttgattgacacgatgccgacttgcgggtcaccagtcaagtaggacagggaaacgtagccgattgagccggaaacactttggatcatttgaaccaaagtacctgagtcgtcagtttccagagactggtttgactggctagcgtgcttcttcaaagcgtattgctcaaaagttgcccgggtacctgatgaagatggtctggaaaccaggacgatctggcagtcattgccgccaacctgcttccagttggtcaccttgccggtgaaaactttgatcaactgttcagtggtcaggctcttgactccagcatccttgttgatgatcggggcgatggcggtaatggccacttggtggtcaactagcttgctggctgacttcttgtctagcttttcatccgcgaacaagtctgagtccccgatgtcgatggtgccgtcagaaacctgcttcaggccttggcctgacccacccccgttagtgttgatgacactgtccgggttcttgtccatgaaagtcttggccgcgctctgcgctaaaggcagaagggcagatgacccggcgatgttaactgtcccggaaactcccttggtatcggctacgcagctgtcgatgacgcagccggtgacgattgccagcaaaacaagtgcaacgatggcgactttggtttttttgcgtgacatgttaattcctccttgaattcttactgattcaaccttaatggaggcaagttaaatgcattcagtgatgattgttaaatcaatgtaaaatgtttaattttatttaagcccagccgctttcttaacagaatcacaaagttttcgcaaggctcccctttacttttcagtttattttgcttaatttatccgttttttacatttgtaaaatatagagctttcactctttacaccttttacatatcgcgcaatattaggatataagtgttcttcttcagtccactcaaagaagcgtttaaccgcaactatataattctggattgtggtcggtttcttgccacttgcctttaaaaattctctgtactgtcttacagtgtcgggatctggatgcgtgatccccttttccctcatgtagataaaccattgcttcaatgaagttcgataagtcctaactgtattaagcgaaccatcaataaatatgacaaacttatcaaaaagatcatccaagttgctatgctgaaaatccaactgctttgagcctatcgaggttaccagttcaccgcttatttttcttattggttttatttctaccatcctaacattcacctactttgttactatgctagcttattacattgttatcttgctatattgctataccagcattgtattcttgtagtatcagattacttcagcataatgttacatttttgtcccctaatatgacttcgaaaacgggcttctaagcttaatatacttgttatatgttcaatttattcataattgttaaaaaagctctgaaaagcgaatttatcatgcattatggacttacaccgctccttatgctgaataccttccaatgttgttgggtaggggggatgcagcaccaatatcaaccaaataaaaaggggctagctctgaagctaacctcattcattaaacattaaaagtaaatttataaataagtcatacttgggtttttatcgctatggtttgggtttaaacacgtgaaattgtgctttatattaataccctgcatctgcaaatattgaccaagcagagcttttaatctgtcctgcgatctattattattgttttggatattcattttatgtataccttcatttttataaattgattgagtggtaactggtcagagttgctgctcattttattttgccaataagtcagccaataaggtggtagaagctgtacttcgtactaacaatattaacgaacatacttagaatatagggttacgggcaatgtcattaagttaaggcattgacttttttacctaaaatcaacttgattagtgggcgtttatttactttgaaagtctatcctaaaacttgacaggagggtttaatttgagcgaagagaatcaaaagaagctgtttggcatctcagcgattatttgcattattttattaacgattacctattttggtgatttagccatcagcaataccttaattaattatcacagctgggtagggacgttttgtcagactttttgcgagtttccggtttatcttatttttgccttatgtggacagattacgatgacttatgcctggaaaggcgactgtgaaaatctgctgggggcaggaccgttgtttgttggcgggcttgcactgtcgctttggcagagcaagaagtatgtcaatgaattcttgggctatctgtattcggtacaaactaaccttaaaaacggtaaggcgatagcaatggccaacagcgactcagtaaagggcggttatgcaggctcaatgattataatggtctggctgttgtttttcgttatatttacgctgttggtacaatggtggctgaaaaacaaaacgactaaacagctgactcgctatatgaaaattgcgattttggcgtcattgacggtttggtttgcattggaagttaatctgaccttaaaagacctgtggggacgctatcgcccatatgaactcacgatcggtaatcatgaatttaccaattggctgacgatcaatggcgttaatgggcataagtcattcccatccgggcatgcgatggcggcaacgttatgcatcgttttttcatggttcgtttccaacaataagcataagatctttttcattggtggcatcgtttatggtgtcgtgatcgctataagtcgagtaatcatgggcgcacatttcctttcggacgttacgttctcgtttttcctgaccgtactgatcatctttatcatgaatggtcttggtaaaaagctaattgaagatttttaaaaattagggctgtgaccatcgaaaggtgaccacagcttttatttatgtgttaaaagtcatgagaatacgccacctttgataaaatttctaatcaaagatagcgtaaagcggtttcaaaaattaagcaaaaaacactcatcaaattctgatgagtgttctaagacgttctccgttcagagtcaatgtcttaacttaatgacattgcttcttacatagtagatccttatttctttagctatttattttttagtcaattgccttagcaactgcactgtttacagcatctttttcgtcttcgattaagttaaccttgccttcgatgaccttaatgtccatcttaatttcacgactaagaagtggaacatttaccttaggttcaaagaattccttgaattccttaagtctttcaggagtatggaagacaccggtagtaactgtgataaatgtagcgaattccatgtcaccaccaacagtcttgtcaagccaatcccagtcttctctgatccagtcccaagctgcttgttgaccataatggttagcaagtaaaccacggtaccaaccacgtaaatcttgtggcttaactacgtcagcattttcaaagtcgccaacaatagccttgatagctgcaagatccttggtgctggttacagcgctgcgtaagtcaaccttgtatgatgggtcagctgttctttggtattccttaattaacttatcaactaattcagcattgccaaagttcttaacttcattgattaaaacgtatggacgaatatctgcattcattgcctctaagttgtcttcattagcagtgaaaatctcatgagctgttttaattgagtctttattttcagcgtaaagactggcacttaattcatatggacgaatttgtgcatcttcatcgctttcacctggcttaactttccagcccaaacgagcaacttgaccagcggataacttgtcataaagcttctttaagtccttttcttgagctgattcaggttcaacaaattggcgcaacttagcagcagtagcgtaaagagcattaataactacacttgacttcgagtcagcaaatttagtcaaaagtggcacaacagcagcataagaaatttgtttaccttctgctaaaagacgtaagtcttgcaataattgcaatttggcaattggatcaagttcatcaacatgagccaaaatatcatcaagcaaagtcttgtcatacttaacgataaagtgcgagttgttacctacattaattctaagtgggtgacctgcttcactacgtaaattcttgtagtaacctaagtcgatttccttatcagacataatcttaggtgccttgaagttagcattcaacggaatttgccattgtctaccaacgtctttaccttcaccaacgaagaattgttgttgtgaaagctttaagtgaccatcgctactatcaacatatgcactaactactggataacctggttgctttaaccatgagtgcataatcttgccaatatcaaggtcagttgcggttgaaagagcatcccaaagatcgtcaccagtggcattaccgaacttgtggtggtcgaagtaatacttcaagccttttcttaaggcatcgtcaccaagaagtgaacgaaccataactagcattctagaacccttagcataaacaatggcactgtcaaaggcagagtcaatatctgctggatcattgatttccatttgaattggttgaacaccgtcagtagcatctctagtcaaagctgcaggtgcttcactggtttggaacatttcccaaatatgccaatcaggttctagaccatcaactgacaagtattccatcatgttagcaaaactttcgttaagccataaattatcccaccatttcatggttactaaatcaccgaaccattggtgagccaattcgtgagtaataactgtagcaaccaatttcttcatttcaaggctagtattgtctggatcaagcaataaatatgcttcacggtaagttactaacccccagttttccatggcaccagcactgaaatctggcaaagccaattgcaatgattgtggaagtgggtatttagtttggtaaaattcttcgtaaaactcaattgcattcttagcaacatccaaagcaaagtctaattccttaggtttgtgtgctttggttgcgtaaacaccaattaaaacgccatccttggtatgggtagtctttgattgcaaatcaccaaaggcaaaggcaaccaagtaactagacatgcgaacagtttcttcaaagtggtggtagccgtccttgtccacttcaacttcaggcatattggcaagagcaacttcgccatcttcttcatcccacttaagggctaaagtaaaggtagccttagcttctggttcatcgatacatgggaatgcttgacgagcaaaagtggtttcaaattgagtaccgataatttgcttcttgacaccatcaacttcgtaatatgaaggataaatacccatcattgtatcagtaagtggtgcactgtattctacttcgataatcgccttaccgtttttgccagtttcaattttaatggcttcgtctttttccaatacatcaaaaggaacatccttgccatcaaccttaacgctatcaatggtcatgttcttttgattaatgaaaacaggattttcgattacttcaccagtaacagttgaagtaccattaatttccttttgcttacggtttacgttaatacgtaaatcataatgttctgggtggaaagtttcataaaaacgtttaactgccatatttttcctcctaattaatagatcatttacttttaattttaccaaaataagcgcgaaagcgctcaaaaaaggctatttcttgttgattgtaaggatgacgtttcagttctgtaacattgctgtcatattgagcttgtactatagaagcatagtcattaagaaataaataagttttgaaagaattaattaaatttaataaggaatgaatacatcaatgaataaacatgttaaatctactttagtaaaaatcttagctgccttagcacttgcctttgcttgtgttgcagttgcaaatgctttttctaccaatacttcaactactcaaactgttcaagctgcaagaaagctttcaaaagctgaaaaagctgctaagagatggatcgcaatgcgcgaatcaggtggtagctacactgctagaaacggtgtttgttacggcaaataccaattaaacattggctacttacatggtaacctttcacctaagaaccaagaacgtgttgctgataattacgtttacggtcgttacggttcatgggttaacgccaagagattttggttagctcacaactggtactaaaattaaattcctttaattcccaaaagctaaagaaaaccagcttagtccaattgactaaactggtttttgttttactcaaaattatcttgcttgataaaacgataaagtgcaatgactaaaactaagatcgagcacgccatccctacataggccattgttccaatgtggacagcattgttagcagcttcacgggctacttgattttccattgcatagcccacaacccatttacgcattaataccggcgtcaagacaaaactaactgtactaataattgaagtcactaacgctacattacgcgaatatggttctttaaagaactgtgctaatacgcagaatgctggagcaatcatcaatagcaagatccacataataatccagcgcccagaacttgaattcatcatctgcgcactattagtggcataacgatatgagctccaaagcgatccaccagataaggtattaagcaaactcaagaaataagatccacgttgtccataaacaccaccattattggacagaataccttgaacaagttggaaagtatcagttgatccagccgatgaaaaatcgaccgacacaacttgcttcatataagtagctaaaaacatggtaactgagccacctaattctagtgctcttaacatgcttaattttcttgaagctttcagatgaaattccagacttaaaactcgatcaggatggtgactgtgaccaatgataaaaatccctgcaatgacgatcaaggctaagataaccaatccccaccagaatttaatcatggcgaaaaataaggctaaaacaataatcgcaaccgaaatatatggtcggtcagaaaaaatattccaaaagttcaacttaacatgatggtaatttttccttgatgcatttgcgacattttgattaataatcggctgaggattactaatttttctgctgcgaaattcttcacgtgttgttgctcttgtcttagtataatcggtccgtgaacgatctgcgccggcttggccgtgctcttttttcatgcgatattcacgccgcgacatatgtgccataaactgcagcccccttctcaaagcactatagtagcacattatcacttttttgcttgaattaagaatgaaatttcaaagaaaatttagctttgttttgcatgtgctaaaatgaatattaataattgtgctttttttagaaagagataactttttgaataaaactaaatcagcaaaactgccagctggttggcatatggccttttataccttatggctcggttgctttatcactgggatgggctattcaatgacaatgccctttatttcactatttatttcagatttgggtaattattctaaactgcaaatcaatctttattcaggattagcttttgcaatgacttttattgcccaggcaatagtttcaccatattggggcagcctcgctgaccgcaaaggtagaaaactaatgtgtatgcgtgcttctggtgtgatggctttaactattaccctaactggatttgcacccaatgcaatttatattattgtaatgcgttttattcaaggttctttttctggttatattaacaacgccaccgctttaatggcaagtgaaacgccgcatgaacgtagcggctgggtcatgagtcaaatgatgacggccgggactgccggaaatttggttggaccgctattaggtggtgctctctccagcttctttggcaatatgtttggtggcgcctgggggtatcggattccattcttcattaccggtgttttaatgttcatcgtctttttaggtacaacgttcttagttcacgaagactttactccaatttctcgtgaaaagatgaagccgatgggcgaaatcatgaaaagtttgcctagcgtgaaattgattgtggtgatgtttattactaccatgttggtacaatcatcaaccatgtcaattgatccaattgtttcattatacgtaaaatcaatgatgcctcatggcggggatgttgcctttgttgcaggtgttgttgcggcaacgcctggtcttggaacgctaattgcggcatcgcgaattggacacaagatggatgaagttggaccgttacgcgtattgcgaatcggcttagtcgtcggtgccgcattgtttgtaccaatggctttgactaattcgccttgggtactagcaggactgcgcttcttattaggaattgctagtgcagggatgttgccagccgcacagacggtattaactttaaacacaccaagctaaagtttcggtcgaatctttagttataaccagtcatttcaagcagttggtgccgtgttaggatcgttaatgggatcgactatttccggtttttcaaattatgcaacggtattctggctaactggatttacgttactgatcaactttgtgcttgttttgatttttgcttggggaatttcttatcggaatagataggttaagcatattcctaaagtatggaatttaaaaatgtaataaaagagctgtaaatatcacaaaaaaatatttacagctctttattattttcaattttttacgctaccatcttttcataaatgcgatacatccgattatcataagcgcacattgaaataaccagattatagcccgcgttttctttctgccacttttcaatcgcgtcaactgcgatcttagttgcatcttctgcaggatagccatacacacccgtagaaatagctgaaaaaattacgctatgcaatcccgctttctttgccaaagccagtgaattatagtagcaagaagcaagcatatgtgcatcactagtcttgccagcataaactgggcctactgtatgaattacatatttcgcaggtaaattatagccatgtgttatccttgcttcacctgttggacaaccatgcagcgccatacattcttcaagcaaacgtggaccagctgctctatggattgcaccatcaacaccgccaccaccaagtaatgaattattagccgcattaacgatagcgtcggctttcatcttagtaatatcgcctttaataatttttatatttttcataatcatgtcctcagaaatacccaacatttctttccacccccattctaacaccaacaacatcagttaggctcagaaagaatacaaagcatattgttatttttatattacgaacttgaattgatttctatctttagtatcctaatattaagtttagcgttataggagcaacgaaatgaaaattctacgacgcagtttatgcatcatttcgatcaccttattttcttttgctttgagcattctcattcctagtgttcaagctagcaaaacagttttagatgatctcatcatatttttatatttaattggaatcgtaattctgggcattctgttgttgtctaacaaatttgattacctatcactcagtctaagcataatcttgctactcgcaactatcattgcttggatcagattcccaatgattagcattatttatactttttttatcgcttatctaatcatgtgcttactaactattttcattgccaaaaggattaagaaataaatttatgttttctaaaaaagaactaaaaatcatcaatactacattaatcatcatatatctgctttcagttggcccaacattcatcttcggttttactaaatcaaatgatttcacaagtactttctttttaattgcaaatatcattttagtttgtttattcattatcattgctatcagaattgctaaaatcaatttcaggctaaagacacaatattatctactaggcttcatcactcttatttcaataatagaactagcctaccctggactgacattaaatgagcgcattagcaattattttgctatcggcaatattattctaagcttgctaactactaaaatctcaaagaaattagtttaaatataggacacaaaatgaaatatctgaaaattccaagattaattaacagtattttgattactttacgtcatactgctataaattattgaattcttattactttaaaactacatcaggtattttcaatcattcaataaaaaataagactagcactaagccagtcttattttctattaatcaactattctttgggtgagaattgccatactgttccatcttggctacggtatgagccatcactcatctttgtaaatataaagacaacttttttcgtcctaattgtgtaaccgttttttgattcagttgtatcaactcggcccaaatcagccttaacacctgtttggggtggattatttttcttagtagaatatgcttgtaaaatttctttattaagtttagtcttcttttgctcagagttgttactatttttagcaactaaaatagcatgattctttgtaaaatacagatcaaaccaattacttaagcgattttctgtgttgtctactgttaatgttcgattaacccagtttttaggtaccgttgtttgattattgtagaaaaacattccaccaataactgctacaagtactgtaactactgcaattacggataacgtcattttctttttcataatacgtttcctcttaaattcagcattaattatttggcactaagcctctcgaaataagtcttacatttcctgaatacatgctaacccatcggtttctatttgttttaaaattgtgatccatccaggtactgtttctatacaaatagccactgtaggcaccatcattataataaaccttagacggagttgtattaagtaaattcatagcatcccctttaccccaactactatatctataaacattagatacatacttgtgaagtggagcatttttgatcggtccatagactttgactcccttagtttcttgaaccgtagtttctgatgcttgaacacgttgattatttgtagccaagactgtagctgcagttacacctaaaagtgtagcagttgtcaataatacttttttcatttttatttctcctcgttttgttctaattttaataatacttttttgcgagccgaagctggtgcaggaatgttcttaacatcataactgtatagataccgtctatacagagtagtagcactttttcctactttttcacgcataacttttgaaagatatcctctatatccgttgtattcaaagtaatgagtgggaccataatcgcaacttgaacctaaagtgatccaaattctcttaggcttatagtaatctgctcttaattctgaacttacagttgattgtgtttcagttgatgcatcaactttgcttgaaaatgtaagtaaagttgtaccaactaatcctactaatgacaatgaaactgaaactgtcaaatcttttgtgtaaatagttctttctcgtaaattgattttttaattatttatttaatcaaagtaggattctaaggtgtcctgaacctgaccaaagcctttatgaattcgattgaaataacggtcattgtagctcattgcctgaatgccaataaaagcatcaagcgactgttcagttggaaactctgccttaggcttagctttgcgcttgatcacattgttaaatgattcaatcatgttagtcgaataaattgaagctctgatctgcttgggatagttataaaagaccagcagatctggttctatgtctttcaagcttctgataacatggctgtaaaccttgccccatttggtatagaagtcatgcaggacagctgtggcttcttctttgtttgtctgttgatgcacctgtttgaattcgttcatgatcttttcacgatcgtcgacgcgtactttagcgcagatattgcgcatgacatgaaccaaacagcgttgaaaatgagctttaggataagtcctggccaaggctgttttcatgccaacaacaccatcagaaagaaaaagctcaacttgctttaagcctcgggatttcatgttttgaagcatatctgtccagacttcaatgttctcgctaggtgcaatgcagtagtcaatgacctccttgtgcccattaggcttgatgccaatggcaatatagactgcttcacgctcaaatgtttctcggcgcaaaggaaggtatgtcgcatccaaatagacgcagaaaaacttgtcgcttagcttgcgtttgtggtaagcctcaacctttggaatcatctgcttggaaatatttgatacctgagctggactgtaatggctgccatacatcttttcaattagatcggctatttccctggtggtcacgcccttggagtaaagcttgataatcatgctttccaagatatccgagtgctgcttgtagtcaggcagcgtgtgctgatgaaattgaccgttgcgatcccggggcacttgcacttcaattgggccaaattgcgtatcaactttgcggaaataagcaccatttctagagttgccagtattccagccatttctggcatagggatcatagcccagaaaggcggtcaattcagcttctaacaagttattaacagcctgttgtagctctttgcgcaataaatcatttattttgtctggattgaatagagcttgagcaaaatctttggtaaaatcattcatgaaggagttcttctttctgtatgtgtttttttgttcaaaccaatcatacgagaaaggaactcctttttctaatgtttaaagaaataaatttaaggaatcattcatccttacacaaactattttacagtctcatgaaactagctttcttgaaattgatttcatttttatacctccgtaattatcaaatgacttatacaaattatctattctctttttctcccatcctttcaacacctggcttgacatttaatttaggtatttcaaaagtatctatactgcctaaaatgacaaaagccgttataattgtaagcgtaagtttgtttctttttcttttcatcattgaggtaatctttatgtacggtaaaaaatttaaagaaatcagaattaagcagaatatatcattagaacaagcagcaaaagatgttgtttcaatttcaactttatcacgctgggaaaatgataaattagacatcaatttttctcaactaaaccacttactcgcaaatatccatttaacattaagagaatttgctagatattgtgaaattaatccatccgatactttctcaattaaagctgcaaaagcatataattcagatgatattaatcagttgcatgcccttgctcaacaacaattagataaatactatagttccagagatagatacgatctatttttaacagcaattgctaataattattattttgacctgactcaaaaaaatattttctcgcaagaagatataaatcgattaaattatctattctctcatgttgaatattggtcagaattttacataacagtttttgcaaataccgtttttctgattaagccagaagttcaatatcaaatatgcaataaaatcttaagccagctatatttacaagatttttctagctgggatatttttattgattctattggttcaatattaaattcactaactagtttgattattagcaatcctagcctagcccaaaagctgttagaaaaaatcaataaattaccaattcctattcaatgcagctatatgaaaattagaagaaactttttagataaattacttcattatcgattaaataaagataacgaaaatgaaatcttaaacattatttcttcacttaagactcttggcctacctcagattgctcacaacttttctacactttttactcgtattaaagacttgtaatcatctccttcttatttttatgtttttataatactctcatatctatttcagcttcaatacttttgcagatttgcaaaacgaatttaaactccatacaaaaacgccttgcccgaaagcaaagcgttttttagcataagcaatttttgattaacccttatctgcacctgcagtaattccgttaacgtagaatttctgcatgaagacaaacaagatagtaattgggatagcgatgattacacacccggcaacaaattgtgcgaagtatgcagtcgcgttacctttagctgtgtgcaccatgttatacaaaccataagcaactgtataagtcttagcatttcctgaagttgaaagaataatacctgagaaaatgaagtctgtccatggagcgatgaaggcagtcaaagcagtataaacaatcattggctttgaaagtggcaaaccaatatgtaagaatacttgccacttagtagcaccgtcaatttcagcagcttcgtcgattgaccgaggaatagtatcaaagaatcctttagcaacgtagaagcccaaaccggcaccaccaacataaactagtaacaatccgaagaggtttaacatgttaagacccttcaagatgtagtacaaagcaatcattgacatgaagcctgggaacatccccaataccaatgcgatctgtaagaatggctttctaaatgcaaagcgaagtcgtgataaaacgtaagcaactgaaatagtcaaaaacgttgaaattaccattgaaagcaatgaaataactaaagtattaatgatccagttaccaaatggatattgtggattagtaaaaatcccaatatagttctgcaatgtgaatttttccggccagaaggtcgaaacgaatccagtatcattgaatgaaaaacttgctaagacgatccagacaatcggtaaaatccaaagaatcgctaaaacaattaataagatataccgaaagattaatgagagccgtctttgatttgaatatgacttcatgtctagccctccttaaatgcattagtacgacgatatgcaatcaacgaaacggttgcactaataataaagatcaagatacccaatacggcactggcgttataacgctgttcctgaccgaaggtcaagttatataaccacgttaccaacaagtcggtcgatccggcgccgttatacttactgttcatcggtgcaccacccgtcagtaagaagataacgttgaagttgttgatgttaccaataaattgttggataagtgaaggtgccattacaaatagaatttgtgggaaagtgattgaacggaaaatttgtgcggcattggcaccgtcaatcttagcagcttcaatttgatcttgtggcaagttttgaataatcgctgttgaaaccaacatagaaactggaataccgatccacatgttaacaagaataacggtaattcttgcaactaaaggtgaagcttggttatcaataaagtgaattggtgaactaatccaatgcaagttcatcaagatattgttcaaagcaccttggtagtccaagaactgcgccatcatcaaaagtgaaacgaattgtggtacagcccaaatgataacaaagattgttctccagaatcccttgtgcttgattccttttgattcaatcagaagagcgagcaaaacaccaaagaagaaagtcgtagcagtagctgccacagcccagatcaaagtccagcctaagactgggaagaaagtaccagctaagtcaccactcaaaacatttccaaatgcttggaaacctgtccacgagaaagcgattgggtgttgacgatcatagttggtaaaggccattgaaatcatgaagatcgttggcaaaatcgtaaagaacaagatacccaataatggaataaccatcaaggttgcgtgtaaccgagtatcaagcaaactcttaagttcttcaacgttagttggaatatggtccccatcacgcttcaaaatataattatgtctagttgagcgtaagttgacaatgtataggtaaatgattgctacacataagatcaaggccaatacaccgaataacaaaatcaaaactgagtttgatggttgcttggttacataaacgccttgtgcggcatcataaacaacttttttggttttaatagtacctaatgtagctaatgaatttaaagtagggataccactgaggataaaccaaacaataaagataatttctgaaagtaagagtgaaataccttttacccattgtttgtttgccaaggcgttactacccattaagaagaatgataacttggtagcaatgtcaccttttgaccaaacctcgcgatatgttgctttaggagctacatgctttttctttagaaacataacttctccccttcttaggcaaaaaggctggacaatttttatttagcccaacccttgcttatgcttttagcaaattatttcttttcaatgttcttagcgagcttagcaagttgtggcttgtattgtgctggcttaatcttgccgtcgtaagtaccactgataagtggagctgcaccattccagaatgcggccatttgtggaagcttaggttgcaatactgagttacctggcttagccatttcgattacagcttcagcaaccgggtcactcttaacagcacttgagttgacagcgctcttcaatactggaatttgaccagcgttcttatgagcaattaattgtgacttcttgttagtaatgtaagcagctaaatctgaagcagccttagcattcttggtgttagcattaactgcgaagccttcaataccaaggaatgcttccatttgtacgctcttaccaccaacttcaatcttaggatacttagcaactgcgaagttcttacccaagatcttcttgatattagcagcgttccaaggaccgtccaaaatagcttgtgcgttacccttcttcaattggttcaaagcgtttgaagtttgcattacacccttgttcttcttttgagctgcgtaccacttcaaagcattaacaccgttttgtgagttgaaagttgagcccttaaggtcttcaccattcttaccgtaaagtgtagtacctgctgagaacattactggccacattacgtaagcgttagtaaagtcggtagctacaacaccctttgaagttaaagtcttccagtccttaacgtcgttagctgataacttagacttgttgtagtaaatggtttgagcttgttgtgcgtatgggaatgcgtaaaccttgcccttccaagttacaccctttgaagcaacatcgacatagttgtcttggatatccttagttgctgatggtgaaagtgggttaatgtaaccagcttcagccatttgacctaattgatcgttaggaacttcaaagacatcagcagcctttgatgggtccttaccaacgtctgtcttagcgttagctgaaccgttaggactttgaactacacgaaccttaatattcttgttcttcttagtaaagtccttagcaatttgcttgtagtaaggaacttgttcagtatccacccaaagagtcaagttagccttcttgtttgaattactgctacttgatgatgaattacttgagccgtttgaacatgctgctaatgataatgcagcaagaacagcagtactacctaaagccattttcttccaaatcttcatgactttttcctcctaaaaaatcaaaacaataaacaattcttaacaacagtagcttctgctacatatggttgtaagcttaattaatcaaatttgtactgcgttttcagtacaagagttagttcacaattgccttggtagaatccttgtcaaagaagtgagctttgttaacatcaaagcccatcttgaccttgtcacctggcttgtgataatcacgtgaatttacaatagcagtaaattcagtaccatcaacttcttggtgaatctgaatagttgcacccaaaagttctgaaacaacaacatttgattcaattactgaatctggccaggtttccataaatgcttcttctgagtgaatgtcttctggacgaataccaaagactaagtctttgtcgttgtagcctttttcttccagcagttttgccttaccttcaggaataccaatattcaagcctttgccatcagaaattcgaccgtccttgtagtgaacattgaagaaattcatttgtggggaaccaataaatccggcaacgaacatattaactggcttgttgtaaacttcaagtggtgagccgatttgttcaactctaccaacagacattacaacaactctatcagccaaagtcatcgcttcagtctgatcgtgggtaacataaatagttgtagtacccaagtcttggtgaagtttagcaatttcagtacgcattaccacacgcaatttagcatccaagtttgataaaggttcatccatcaagaagataggtgccgcacgaacgattgcccgtcctaatgcaacacgctgtctttgaccaccggacaaagcacctggcttcttatccaagtactcttcaaggcctaacatcttagctgcttttttaaccttttgatcaatttcatctttaggcgtgtgacgcaactttaaaccgaaggccatgttgtcataaatggtcatgtgtggatacaaagcgtagttctggaaaaccatcgcaatgtgtctatcctttggagcaacatcattcattactttatgatcgatttccaaagtacccttactgatgtcttccaaaccagcaaccattctcaatgtagttgacttaccacagccagatggaccaacgaaaacgatgaattccttatccttgatatgtaagtcaaagtcgttaacagaatatctgtcgttacctgcatattttttgtaaatatggtttaaatcaacctcaaccattgtttcccctactctctttaattatttttcattaaaaactttttcaatttcactcaatttcaactcagcagttgttggaacgatgtaatcagcttctttcaaaagctccttatcaccaattcctacggcaaattgacctgcagccttgattgcttcgaccccagctttggcatcttcaaaactgattacttcatcagcctttaaccctgcaatttcttgcgctttgatgtaaatttcaggatctggcttaccatgatgaagtgttgctggatcaacaatgccatcaaattcatccataatacctaatctagttaaaatcttaggagcattcttagaagcagaagcaattaccatctttaagttttgcttcttagcatctgccaataactcagggatcccaggcaaaatgtcctttggcgtcattgtttctacttgttcaacaaatttagcgttcttttcagctgcgaacttttctttttctgcttcagtgtatttgtcttcttgaccaccgtacttcaagatcaggttaagtgaatccattcttgaaataccacgcaagctatcaagttgagcatctgttaaggtaatgcctaattccttagctaaattgttccaagctgtaaggtgaaacttagctgagttagttaaaacaccatctaaatcgaataacaatcctttaagcatttgtagtttcaccttctttaagagtaactttcttatcgtgaactaatacatcaatatcttcacccttaagcaaagtaagcttagttccttcatgatcaacataaacttcgatcaagcgaccacggtagttgatcttgaagctgtagtgatcccaaccttcaggaacaaatggattaaacttcaattggttgtgatcgtaacgcatgcctgcgaaaccttgaacaattgtaagccatgaaccactcattgaagtgatgtgcaaaccatcaacggtgtcgttgttgtagttatcaaggtcaagacgagcagttctttggtaaagctcaacagccttcttttgcttgccaagttcagcagctaagattgagtgaatacatggtgaaagtgaactttcgtgaactgttaatggttcgtagaagtcgaagttcttttccttttgttccatagtgtattcatcgttcaagaagtagataccttgtaaaacatcggcttgcttgatgaatggtgatctcaagatcttgtcccatgaccagtgttggttaattggacgttgatctttgatttcgctaactggacgaatatccttgtctaggaagtcatcttgttgtaagaagatgcctcgttccttgtcttctggtaagtacatgttatctacgatgtcttgccatttagccttttcttcgtcagttacgcgaactctttcttgagcttccttagtagcaagtggcaaacgttccaaagtgtatttgagaagccatcttgccatggtgttggtgaaccagttgttgtttacgttgttttcgtattcattaggacccgttacaccgtgcattacgtacttgttacgccactttgaccagtgaactctagctgcccagaatcttgcggtaccaactaaaacgtccataccttcgttcttaacgtagctgtcgtcgccagtgtaatcagtgtacatagcgattgcgtgaggaatgtccgcatttctgtgaatttcttcaaaggtgatttcccattcattgtgacattcaatcccgttgaaggtaaccattgggaacaatgcacctggtaagccttgttctttagcgttatggtatgcgcctggcaattgatcgtgacggtattgtaaaagtgcccgagtaacactaggatcagtaacacataagtacattggaacaatgtaggcttcagtatcccagtaagtagcaccaccgtatttttcaccggtaaaacctttaggaccaacgttaagacgttcatcttcaccgtaataagtcatgaataattgacaaatgttaaagcggataccttgttgagcggcatcatcaccagcaattacaacatctgatttgtcccagcgcttttgccaaacggcttcatgatcagctaagttttcttcaaaactcttagcttgaagcttggtcatcaattcagctgccttagcatcttgatcatctggtttgacgtcacgactagtaacaacaatgacatctttttcaagatcgtagctttcgccttcatttaactcaactgaaagcttttcatgaagttgggctgcttcagttgaaacatcacccttaactacttcaccattatgacgaagactttgcttaaggaggactgtaaattgtggaaccttgtatgggttagccttagtttcaaccttaatagttcttgcttcagcattttcacctaaaggcatccagaattttgcatcgtagttactgtcttcgttaacaacagttccatcaagtgctgcatcaaagtcgatcttagctttaccacttaaaacggtagccttaactttaattaaagctgcttcttttaaggtaatatgtaaaaacctttcgaattcgaatttaaccttagtatccttaccttcataagtaaaacttctagtcagaagaccttggtgcatatcaagtgctaagtagaaatcactaaacttaactttagctaagtcaagtttttcaccattaatcgtaattcccatgttgatgaaacttggtgagttaggaaccttgccaaagtactttggatatccgttcttccaccaaccaacacgcgtcttatcagggaaccaaacaccagcaaggtaagtaccttgtaagctgtcacctgaatagccttcttcaaagtttcctctcatacccatgtaatcgttgccgattgcagtcatactttcttgcaatcttttatcttttggttcgaacttatgggtaacgaccttccaaggatcaatttcaaaaattcgtttcatatattctatctcccgtaatattcgaggttctctcttgtttacgctttcattatcctttagttgaaagcggtttacaatattaaatctgctgttaccgttatcaggattagttaatagaaaaagaaggtagatcttaatctgccttctttttttgcttattaaaagtaacttttaatgaacactcactacaaagccttttggtgccaattgattattctcataatcttgactaaacgtgttctcacaattgatctctactggatgatcggtcgtgttaaagtatgctttaatgctttcattcccctcacgatcgacctcaattaacccattctctgttacgtgtaacttaattcgacctttaccgaaagtttcatcatgttgcaaacgaaagtcaatcaattgatgaactcgttgccaaaccggaccgtcttcttttgcccaatccattggtttacgacaatcaggatcgttgccaccagtcatacccatttcagttccataataaatgcatggactacccttttgcataaattcaaaagctaaggcttgcaaagccaaatcttggtctccattagctactgtcaaaattcgggctgtatcgtgtgaatcaagcatgttcatcatggctgcattggtagcatcgcgatatttcatcaactggtctgtcaaacgactagttaattcttgtgctgacagcttatgcttgaaaaagtgatcttcaatctgcaatgtatatggataattcattacgccagtaaactcatcaccgttaagccatggacgagctgagtgccaaacttcacctacaatataaaagtctgacttgatatcagtaacagccttgtggaatttcttccagaagtggtgatcaacttcgttagccacatctagccgccaagcatcaatatcaaagtattttacccagtaagtagcaatctctaacaagaaatcctgtacttctggattagctgtattcaactttggcatatgcttttcaaaggcaaaagtatcgaacttaggactaccctcaccctttaatggatcgcggtaaggttcaactggatattcattaatgtggaaccaactagcaaaacgagaacttggaccatttttaacaacatcttgccattgcattgattgatcacccaggtggttgaaaaccgcgtccagcatgaccttcattccgcgggcatgagcttcattaacaactttcgcaaataaatccttgtcgccgaatgccggatcaacttgcaaatagtcaatcgtatcatatttatggttagaactggctttaaaaataggacagaaataaaggccattaacacccagtttcttcaagtaatctagatggtcaagcacgccttgcaggtcaccaccatagaagtcttcgcggccaggatgatcctccggattccacgctttaaccccttggggatcattagacttatcaccgtttgcaaaacgttctggaaagatttggtaccaaacagtatgcttaacccattctggcgttttcaccatatcaatttcatggcaatatggcactttgaaataagaaccatcttccataatggccttgtctacatcactgctaattgcacgatcaccgacaactacactagtgccatcactgccaattacttcaaaggtatacttcaagcgatgatatggtgcttcaagcgtaatgccccaatgatcttcacactgccctacgccaattttttccatctcacatgttttagcctgttcaagtggcaaataattatcgcagtaatgaacaattacttttttaacgtcatttttagcactgtgaaaacgcacgcgaacatgacttggatcaactacaaaactatcttcactttcagttcggtgtcttaaagctgctaattgcatatattaattctcctttttcaacacaacacctgcataaggcatcaaagttaatttttcattagttaattgatattctcccgcttttagtgttgcaacagtataaccggctggtatttcaacagttgtcttttgatcactcaatgaaacagctacaatggcactttcatcatgtaaatcacgttgataaacatagctattcttatccgttgaaatcatataatacgttccaatctggaataaggcttcttttttgagttccagcagttctttgtaaaaattaaacatgctggtggtatcgttaatctcattagctacgcaagcatcatcctgtttaatacctgttatccatggtttaacttcactaaaaccatggttctcagttgcatcccacggcattggaccacgggccggcaatttatgtgtttcactaaccatagctaaggccgcatctttgctcaaaactttttctgcatcctttaaccatggcgctacagtttgatcttcgaattgatctgcactagtgaaatgtagattctttaaccctaattcttcaccgtaataaattactggaattccgcgttgcaaatacatcaacatcgccaagctcttagcctgagtctgtgttctagctacgcgtgtagccaaacgggccatatcatgattattccaataaagagtaggctgcgatacgcctgctaatgtttgttgccaaaccacttgattttgtttaaaggccgtcaagtctaactttttaggctgatattgctttgaaaaacgctgatcacaattagaatcatcatcggtaaagtaccggaaggtaattacactatccattaggtgattacgcttagtcgtgtaatcaacagctagattgacactagcacttgcagcttcacctaataaaagcgtatctggataatcctgcttaatctgctcacagaaaggccgcatccattcctgcacctgtggtaagttagcgaaaaatggttccgcaacaattggcttgttcacgtccccatctccagttggataattttgtcgcaaatctgccttgccaatatggataaaagcgtctaaacgcaaaccatcaattccttttttcagccaatactctgccacttccaacatagcatgccgaacttcgggatttttccaattcaaatcaggcatccgtttatcaaacaagtgaaagtaagattgacctgtgcctgctggatctggctcccatacactgccaccaaagaatgaaccccagttattaggtcgcttgccatcatgaccagcgaaaatatagtagtctcgataaaggctatcggggttcttgatggcatcttggaaccaaggatgttgatcagatgtatgattcaagacaaagtccatgatgaggtggatccctgccttatgcaaatccttgattaagttttccatatcttccatggtccccatatgaggatcgattgcgaagtagtttgaaacatcatagccgttgtctacttgtggtgaaacaaacacaggattaagccagacggcgttaactcctaaatttttcaaataagggatgcgtttgcgaataccattaaggtcaccaacgccatcgccattgctatcttgaaaagacttaggataaatttgatatataattgcgtgatcgtaccaatgtgccataattaatttcctccacgcatagtttaagggaaattagaaaccgttttcaacatcatatttattgttagcggtatcaaaaaagcacaactcaaatttgaattgtgctctttgcttacttctttttaaatatcatgttccaaacattccgccacttgctgcctttctcctgcaaatcagccactggctgcgttacctcaatacagccaagatattttccttgatcattatgcaaactataaaaggcaatgttcaccggaatcccatctttatgaatcataatcgacaatttaccacgtttgccttcgtgcatctgctttaaaactgccttaacatgaccttgactgtgaccgggatgaacttcaaagacagttttgccgatatcttttttcagttcgcttaaataagcgatgtttattcatcgatgaccaaacaaccacatcgttttcatctaggacatccatttcctgaggaatagtctcaaagatagcatttaactgttcgacacttaaactgccgcctattaattcgattttatctgtcatttactttgctaaccttataacttcacgggcaatcatcaattcttcgttggttggtacaatcaatgcttttacttttgaatcaggcttagaaataaatttttcaccgtctgttcgattagccttatagtctggctctaagccaaggtagtggagtgccgacattacaccggcacgaacacctggatcatgttcaccaatacctgctgtaaatacaatgccatcaataccatccatctctgctgcatatgcaccaacataacgtacgacacgatttacgaaaatctttcttgctaatctagcatgctttttcttacttgccaacagatcacgcatatcagaggaaacacctgatacgccaagcatccctgacttatgatttaacatgtctactgcttcttctactgtcatactggtcttttgcataatatactcaagagcagatgggtcaaaatcaccactacgtgttcccattgctaccccagttaatggactaaagcccattgaagtatcaagtgatttgccgtttttaaccgctgtaactgatgcaccagaacctaaatggcaaacaatcaacttaagcgtatataagtttcttcccattagtcgagcagtacgtggagctacgtagcttactgaaataccatgtgcaccatattttctgatcccatatttctcataatacttataaggaattggataaagataattaacctgatcaagactagtatgatatgaagtatcaaacactgctacttgtggcacatccgggataatcttcataaatgccttaattcccatggcttctggcacattatgcaatggtgctaattcacccaagtcaaaaatttgttgaagctttttttcatcaattaaggcagactccctaaaaactttgcccccattaactactctatgacctacgcctgctagttcatccagactttttaatacgtgaaacttctttaaattttcaattaataagctaacagctgcttcctggtctggaatcgaagtatttttaatatattctttgccattcaacttaattttgaaaacagcattgtccattcctacacgatcagccatccctgaagcgataaccttttcgtctgggaataaaaaaagcttatatttaaatgatgaactaccagaatttattgccaaaacttttttcataatcgtgacctctattcatattttatctcttatttttagtatagcgctttcacctataatagaaaataattttaaaagcagttaaaaagcacctctgagttatcagacgtgctcgttattttttcgatttatctagttgattggcgccgaattagcttaggtttgagcattacttcaccttgaggtgaacccgattgggcaatcttttgcagtagcattttagctaacatttcacccatttcaaaaattggttgtttaattgttgttagctttggattagaaacttgatctaaaaagacaccatcaaaaccaataactccaaagtctttcggaattcgagcgccttcatcttgcaattgccgtacaacacccactgcaattcgatcactggcacagacgaaacaagtatcttttttaaattccttaaaatgttcatgaatcacatcttgcgcagcatgactatgattagaaacccgaaaaatttgtggtatcaactggtgttgttgcaaagtgttgatataaccagcttcacgtgaatattcaaatggctcttttaaatcaattccaataaagacaatgtgcttatataaccggtctaaagcatattgagtagccatcttctctgctaactgattatcagaatcaacaaagtcatagccgcggtgattttcaccaaataaaacaaaaggcttatcgagtttatcaaataattcataatctttgtttcgcgccccggtaattaaatagccatctgcattttccttttcaatttgattaggatccgtaactaattgcatcgcatactgcttagtatttaaaccacgagcaaaaccaaaaagcaagttcatatagtatggctcagtggtatcaatatcttctaaagtgacgaattttaccacgttagtccgattattaactaaagcctgtgcaattgaattgggatggtagtttagtttctccattgctttttctaccattgctcttaattctggcgttacttgctcaggatgattaatcactcgtgataccgtcatttttgatacatttgcttctttagcaacatctgataaagtagtcatattattcctattctaagtacatctttctgaatcggtttaaatctttttggctaaagccaagctcttttttgaaaaatccatcaaaactgccccagccttggcgaatagtttccgtaattccacgaatagccggtccctctcccttggtaatattcattttagaaactaggctagcaatttcattatcatcggggaactgtttagccaaagcaaagtcatacaattcattggtcaataaataatcacgcgaaatggtgtcatcatcaacacctaatgcagttaagatcagtgctgaagtcattccagttctatctttgcctgcactacaatgataaactagcgcatcttcttcaggtaattcaatcaattccgcaaaaattttagcaaattcatgttgactatgtgaattaagcaaaacctgctggtaaatttgaccaagccaattgtcacccatatcaggaatatgatggacaaagcgatataacttgttatcgcctttattttgcttgcggttttcagaataaatatgtgcatcaacaaaacggacatttgaccaaagcttgtcaggcgctgaattttgttcatacttagagcgtaaatcaacatctacggtaattcggcgttcaactaacttttcttgatcttccttcgacaaggagctaagtgaatcagaacgatatattttgttccactttacatgttgacccttgtcattttggtagccgccgatgtctctgaaattcagcggtcgatccaaagctaatattcgatcatgcttcatttttccttgcctttcctcattaaagtgttaataccgtacttttattatatcattatcagtcatgtgcaaataaccgagcagcacgaattgcacgttgccaacctgaataaagtttttcacgttcaactgcactcattttcggctcaaaggcctgtccaatcgtaaaggtatgctttaactcgtcaatatttttccaatagccaacggcaaggccagctaaaaaggctgcacccatgctggttgtttccagcgttttagcgcgttcaatttcaatccctaaaatgtcagcctgaaactgcatcaggtaattgttgttgctagcaccgccatcaacacgtaaagcaggaatttcaatgcctgaatcttgttgcatcgtatcaacaacgtcacgggtttgataagctaatgactgcaaagttgctttaattatatccttgtcagtagttccacgtgtaacaccgaagattgaaccacgagtctccgcatcccaatatggtgcgcctaacccagtgaaggcagggacaacgtaaacctcgttctctgatgtcgactcaagcgctgcttgttcagagtctggcgcatgcttaatcaacttcatcgaatcgcgtagccattgaattgcactaccagccacaaagattgatccttctaaagcataagtaatcttaccattaatgccataaccaatggtcgttaacagattattgttagagtctgttggcttgtcccctgtgttcatcacaataaaggcaccggtgccatatgtatttttcaccattcctggtttcaaagctagttgaccaaataaggctgcctgttggtcaccggccatcccagcaattggcacttgtccaccaaagaacatatatgacgctgtttcaccataaatctctgaattcgagcgcacctcaggcaacattttcttaggaatattgagcaaatgcaaaatatcgtcatcccacttgagcgtgtgaatattaaacagcatggtccgtgaagcattagtgtaatcagtcacgtgtttagcaccatcagttaacttccaaactagccaactatcaatcgtgccaaaaagcaactttccctgttcagctttttcttgcgcgccaggtacatgatcaagaatccagcgaatcttagttgcactgaagtatgggtcaataattaagcctgttttttgacgaatttcatcactgtagccttctttttttaatttttcagctaattctgttgtctgccgtgactgccaaacgattgcatgataaattggctcacctgtatccttgtcccaaacaacggtcgtttcacgttggttggtaatgccaattgcggcaatttgattaggccaaatgcccgaattaataaaagcattggcaattgttgtttggaccgccatccagattttattagcgtcatgttcaacccagccaggctctgggaaatattggtgaaattctttttgggcagaagcaacttcacgtccatcatggtcaaaaataattgctctagtagaggtggttccttcatcgattgctaaaatatatttttctgtcatagttattctcttttctgcaaaagcgctttcttataatattactgtttttctaatgcagattctagcagttaatgtaatagatacggtataatttttataaggattttttaaggagggcattttaatggaaaaaaatcaaaaaattgcggtaacaattgcgggtaacgatagtgatggtagtgcaggaatgccagcagatttgcattcattctatgcacggggcgtttatggcatggggctgatgaccgcggctgtagctggtaatacaaaaggaatttttgcccaacaaattatgccgcttgattttatccaaaagcaattcgatgtgttaaacgacgacttcaagattaatgcgactaagacagggatgctggctaacaaggaaattatcgattgcgttgccgataatcttgaaaaatacgacatgggtaaaatcgtgcttgatcccgtcatcatcactaagcacggtgccaccctacttgatgatgatgcctaccagaccttcttagacagattattgccgctagccgatgtaattacgcctaacttttatgaacaacaaaagctaactggcttgaagctaaataataaggaagaaattcacgcaggcgctaaaaaactacaagagatgggtgctaaaaatgtcttgatgaagggacgtcatgactcagataatcagactgaagtaactgatattttgttgactgaagatggcgcatttcacgaatttaccaagcctttctttaagactgatcgcgtgaatggcacaggtgatactctctccgcagttattgcggcagaattagctaagggaaagtctgtaattgatgctataaaaattggtaaggactttacttacgctgcaatttctcacccaattgatgttggttcaaaatggggtccgatcaatcacttggctgcacaggaagaaaatagatagaaaaaacaccgaagctcagattttgagcttcggtgtttttatgtctgttttcaattaaatcattgctgtgtagagatacagtattacacaaataatgaacgctattacgtatcccatgattatgctaataactcaatgaatatgatgatgttgcatccaagtagctaaccagtcgcccaggactagacaatatgatcctactaaccagtaattgatctttttctgattaattgctggtaatggcaagattaagattattattagcgctacagctaaaatatatttcaaggctgtatagagtttaggacttagtaatgattcacgcaatttattttaccttgtttcttctaaatcatatattcgatttccattaatttttggatttacttatttcttatagctcttaatgatccaaaatataccaagcataataaaaaggatcgataatactactagttgcataactggtttatatctaagaacgcatgaatctattagaaataccacaccaacagcaataattgtcattccagatattttgctttccttttttataataattattacaacagcaattaagattactactgcagttacaattgaagcaacgtcgacttgcattaacttaagtttttccttccatctaagtcttcaactattattttaaatcatgtaagttctcctgcgattgactttgtatcatatttgttacaaattattactcagaccaactagcaataaagtttttatagcctaatacaccaagatcctgtctaatctcttttgttttgtccttttgatccaaaaataatgctttcatataaaacacttcaattctataaatcatcaaatgaaacgacccagtagcattaataatatattccatcacatcatcaatatgatcaaaatgtgtcagttgtttatgaacctttctgtcgtaacaaaccaccagataattttctagcaatcttaaatatctttcagtcgttaactctgaaagctcagatttgtttgcaaaatcaagcaagcgcccaattaaaaagtccaattcatcttgtggccacatcggcatcgtattaaccagtaatctcaacaggtctggtcgctcaagccaattatttccttcatcaaactcagcttttattttcttcctgatttctacatcaatcttgtcagtcttccccttaaaatatgtcaaagtaattagtgctcgcaactttagaatctcattattagatgaattcattatctgctgacaatacttatccaaagcttcagtatctttcgcactaactgcttgattcattttagtttcaaattgcttctcaacttttcgttcttctaacgtgtagtcatcttgaataagatcacaaaattctactaaatcaatttgatgctcaagcaatatttgaaataagctttctgcatttatgcgatttttatcgctttcaacttttgcataaaacggtcgactaagaatcccttcgcacatctgctcttgtgttaaccccaacttcaatctttttttacgcagtgcttctccaattttcatagcaagcctcctgtacaatttttaataaaaatagcactttatactttttagtcaatgaaaaaagccgccccgagggacggctttgtagtggcgtagcatgctacgaatcaacgtaggagttggtcaagcatatgctttaatcgcttcttaagagctttcttaaagcgcttgatgcttccgcggtcaattggtataactactagtacgagaaagatacaccacttcacggagaatacacctccttctgcacgtaaagtaaaggcgctaccctttgtgacgtgcattttaattttatcatgatataatacagttagtacgagaaagtatgcacgtgatgtgcgtgggctactagctggtagctcaaaaattagcagggcggtcgaatgaccgtcttttttgtgcaaaaaaacagcaacgaaattaatcattgctgctaatttacttacttctttttctcaatcacaaaataatatcctgctgtcaaaatttgagcaattccttcaagcgtaattgccaaatctgcaccaaaacgcgctacaatcagcccgcctaaaaacgagccaattggaagcattgatgacagaatagagtcattaattgtttctacttgacctaaacatacctatcttttttagtatatggttctatctataaatataactaccatcgggataaaacgttattgctcgcttatccttgtaggactcaattaatgcattgattgaatttttatctttgaatcccattctttttgctaaataattttgcgtcctgcctgtatccttacaaagggaatttaatgttctctttagatacttaaaatcatacttcttatttaaagaatacattaaatctaaaagagatattattacaattgctaatctgtgaggataattaccattatccatattcaaatatttgcgatattttgtagcgactttaggcatggtcttcaacgaaatatctaccaaatctccattatgacaacatatatttctaattaaatttagcaattctaaactttgaattagacttttaatatctaaatggaataatttctgactaatttctttacggttatcaggtagcatcaacttggctaaatatatactttgcccgaatgataaagtatttaccataagccaaactgtgggaaatattcttgtacggtccgttcgttcaaatttttgaacatctatatagttagactttttcacttgatgctgcaattgtgataaaaaagccagttcttcattttttatcttatacttatctatttttacgcccataattcttccacgacgtttaacagtacctaaatatttatttcttccactattttgacaccacttttcaaagtccaaatataaatatgggtctgtcttacctaaaatataagagatttcattgttcaatgcagtttctatatcaccaattgcttgaaaaatttcttgctttaaacgttgatctctatagtatcttttaaccaattcatcaaagctaatacccatatactgattattatcatgatcccaaaatgcataagaatactgtttcaatttataatatcctattatttttaacgtattaacctgcttttcgaatttaatgctattttgatcaattccagtgattccttttttcttaaaaagaaggacttggtctacatatgaaagatgatgctccatgattttctccataaaaaaaccttcgctgatggataaatccgtcatcacgaaggtatgatctatcattattatacaagatttcccaaaaaaatgtagtatttagctagtatttttatcgaacgtatgattaattatatagttatttacatttcaaagcaaacagtagataaagtaagaaaaaaacagttacatgccataatgtaaacttagagatttttagcaatctacatctatgcataatttttgcatgaaaacagcaatgatgagtgtattttaatttacttctttttcccaattacaaaataatatcctgctgtcaaaatctgcgcaattccttcaagtgcaatcgcccaatccgcaccaaaatgcgctacaatcagtccacctaaaaatgaaccaatcggaatcattgacgataaaatcgactcattaatcgtttctactctacctaaaatatgcggactaaaactctcctgcaccaacacttcaaagttaatattcatcatcacaatccatagttcagacgtaaaaaacaaaatcaacagtagaaacggcatccctttgggaacagctggctcaagaacaattgctaaacctgataacgtgagacaaatgacgactagccttttaatcttgcttttatcaaaagttagtcgctgtaccagtacactgccaactaacccacctattgaagaagctaattctaaaccgccatagctaatcgctgatttagtcaaatgctcagtcgcaaaatatggcaagcccacagaggaaataccataaaatagattagtcactgcaaaaggcatgatcaagcgtgctattttgccttcttgtttcagagtttgccagcctttaagcaaatcttgccaatagttttctgtgaaatattcattcgacttattcgaaagtaataatttcctagacaatattagtcgcgtataaaaagctagggcgcttgcaaaaaatactgcagaaataattatcgtggaatcaagtgacacccaagtaatcaataacgttgccgctgcattcaaaaacaaatccagcgttttataagtcatttggaaaacgccgtttactttagttagctttgcttttgaaataatgactggcaaaattttttcttcagcaggataaatcaaagttgagccaatcgttgaaatgacgtatatccctagcaaaagccaaattgttaaatcttgccacagtttaatttgaaacaacaacgccgctataacgctgtccactatctgcactagcgttacaagcttaagtagctttttaatatagacacgatcaatcaacggtccgaagacgaacgacaacatttcaattgatgagtctgcaacaaagattaacgataagataagcggcgaatgaaagcgcaccttgaaaaaccacaagatcgccatgtaaaacaacgaatccgcaatgttggttaacactcgtcctgctaataatcgtctgacattgacattttctttttcaattaagttaaacattttcccattccttttcacaacactactaatgtcgctgaaagccagggaaaattactatttagttttagtttaaaatcccagactttcagctaaaaatctgggttgagccttaagtagcgtttgacgaatgaaaggaaataattcattcgcaaacttaaccctaaaatgtcgcgcattttagtcctcgctttctgtgaaaattaagatcattatagcatgaacagtggcttatcaataatagtcattctatccttatatttttcgtattttcattcaatttcagatcatgacttatgataataaccaaattaacttgcgctatttcctgcaatagttttaataaatcactttgtaactcaggatagatatttgccaacggttcatctagtaaaaaacattgcgcgccagtttttaaaacagcagaatataactttactaactgtatttcacctgttgatagttcgctcatctctctatctaaaatcttttcaattctaaattgtggcgaatcaaaaacttttgcaaaatactcgcttttataaacctgacttttatcagaatatgatcctaaatagtccctcactgaacaattagggagtggtatatcttgaaataaacaacttatgttcgattctctcagttttcttttattaattaaatcagcatctataccatttatggttatttttccttcctttttcggcgtgtataggccaattattgtcctaagcaaagtagattttccaattccatttctgcccctcacaatataaaatcctggagtaacaaaattggcagaaaaattttgggtaaataacggtgttttttcatctaagtaaatattaaaatcatgtacttgaatcaagtttattttagagattatttttctaccatcttgttcattcttcatggttagtatattgttgattctcatccacgctactttaaatgattcaaatttaaataaaatacccggatttaaaattgaagtgcaacactaagtgttaaacaaaaaggccatgaagacctaaacttgaagtgacgaaaaatcaagaaaggaagatctttatgaccaattcaaattctagcatttctaagcactatcatcaattaaccagcgtacaacgtggacaaattcaagcaatgctggattccggcataacttcccgtactgttatcgctcaagaagtcggctgccataagtcgacaatcagtcgcgaaatcaaacgcggaagtgtcctgcaaagagacagcagctatttattgtatgagcactattacgctgatactgcacagatttattatgagaagcgtcgcaaaaactgctatcagcgcaatccattgaagcattatgctgtctttttgagaatgctctccagacgctttaaagctaaatttgatgccaccagcatcgatgagttcgttggtgaattcaaaaggactatgccaggctacccttgtcccagcacaccaactgtctatcgctatattgatcagggcttgctggacataagcaatattgatctgcctatgaagctcaaaagacgcaggaacaagcgtcatcacagccatggcggtcacgctttgcacaagaagcatcttggcaattccattgaacagcgtcctaaagagattgaagacagaaaagctccgctgcactgggaaggagatctggttaaaggcgtcagacgcaagaatcagcctgctttaatgactttgactgaaagaaccacacgctttgaagtagttatcaagattcctgactatcgggcaagcacatgccaaaggctgcttcaaaaggagattgacagacatcctgcctggtttaaatcaatcacgtttgacaatggctctgagtttgcggatatgaccaagatcaagggctgccagatttactttgctcacccatattctccatgggaaaggggcaccaatgagaactgcaatggtcttttgcgtcaattcttccctaagggcaagagcatgaaagacaagtcaaaagcttatgttcaacaggcaactgatgccattaaccacaaatatcgccgaatcctccaatatcacacagcagaagaactcttcaagcaatatatttcctcatagcctaactgttgcacttaatttgacaattcaggtttaaataaaatagaaaaaatttcatcaacctgtcccaaaagttgattaaaatattgaaaaataattgaaaaggaaccgattgtcatcttaccggaaatcactgataaaccgccattaataaacaatactaattgaaaaataagttgtaaaacaatctcgctattagacatatttaaattgagaagaaaatctctcttagcaacgcctaaaagcgttcttttagtattgctccatctctcagtttctattttctctcttcggttaccttttacttcaatatacctgcttaaccattcagtaaaaccagaaaagtacttattataagcttctttcaattttaaactaacttcaaaaatcttaggccgtaaaaataaatatatgagactatatgcaggcaacaggatcgctattaacaataaaaaaccagacccagccataaataaatatgtaaaaatcaaaattgaagaaagggcgattgaaataatttgatttattgtttggaataaaaaagtcaacacttcagtagtatcttcagtaattctatctgctgtttgaaccgaattcatctttgtaactgctagcgtatccttcacatacagttctttcattattacatcattaacttccatgtttatttctctaaatcttaaaatctgaattttgttcataaaatatgacaacaaaagtctgataagacttaaagtcgttattaatacaatactacgtacaaaagcagccctatcagccttatatactaaggaatttaacagtattccttctaagtaaacattaaaagtcaaaatgccagtactgataatattcattcctaatagaagccaatattcaattttatactttttatcaattttgctaaaaatcgtatgcatagtgtcacctaactctgactagcagtcaaaaatgttaaaatataatgaatataaaattagataaattttatattcttatttatcctatgtcaatactaaataaattgatttggttttactttcatgctgtatttgatattatgtagttactaactaccaaataactatctatcaactacagaaagagaaaaatatgactgaaaaagcagcaattaacatccgtgttaataaagaaactaagcaaaacgcagagaaagtattaaacaaactaggcatcccgatgtcagtcgcaattgatatgtacttacgacaaattgcattgactgacggcattccctttgatctatcttccaagaaaagaaaaaagaaaaatgatcacgaaacagcaatgatggtcgcagaagctacagctcaatatgaaatcgttaaatccaactgggaggataaattagctgagtttattcctgactggatgaacatgaataagatgactaaagaggagcttgaagcaaggttagctaagcatgcccaagatgcaagagatggtaaaagtgtcgagattagcaaaacttttagcgacctgaataaagaattaggaatttaaatttcatacaagaatatactgtcaaatcaagtcctaacgtatctgtagaacttaaagagatatatagctctatcttgcaattatctcgatctccaaaaactgctcgagattatgtaaaagatcttgaacaaactatgcaagcgttaaattattttccagaaagatatagaaaaactccttcaggaaaataccgacgagttaatttcaaaaaatacgctatattctactttatcgaaaacgatactgtacacattattgatgtcatactagcttcatcaagtacagtattcaaatattaatcctttgccccattctagctattaagctatactagacagaagaaattaaacgaactaagggacaataaaatgagcgataaattaattaaaattgcatacctctacgaagatttaatgaatacttacggtgactcaggcgatgttaaaatcttgagctttttgctaaagcgtgaaggctacgacactcaagtcgacaatatttcacttggcgatgacttcaatgcctttgactatgatttcgtcttcttcggcggtggtcaagactttgaacaaaccgttgtagccaaggatttaccacggcacaaagaaacacttgataaatacatcaacgatgacaaacctatgctctgcatttgtggtggttaccaactaatgggtagttactataagaccaactcaggtgtaacaattcctggcttagacattttgccacttcacactgtcttcaagagcgacaagcgaatgattggtgatacccgttacatgaccgaatggggcgaagttaaggcttttgaaaaccactctggtcaaacttacttcgacaacaaggacaagttgcatcccctcggcgacatgatcgaaggctacggcaacaacccacaagaccacgtcgaaggcctgcgctatcgcaactttattggttcatactcacatggtccactacttaaaaatactaatgtagctaatgccatcatgaaaatgattatcgcttggcaccaagaacgtgttagcgaagccgaaaaagtcacagaataaaaaagacccagtcagaatttctgactgggatttttcattatcaaattaatttaaaacacgtttagcagctgagggataaaagtaggcactgatagcctgctttctcaccccttgactaggagttgcagcgtgaacatattgtccatcaccaacataaataccaacatggtaaggagctgaggcagaaccccagaacaacaagtcgcctttcttaagatgacttaacgaaacctttttacccttagtaacttgaccataagtagttcttggtaaggtctttttagcggcttttttataaacgtattgagctaagccagagcagtcaaaggctgaaggaccggtagcaccgtaaacgtaacttttgccaacttgttctttagcaagttggactacggcgttacgtttttctgttttgctttgactagctgcttggacagtttgcgtttgaagtggaacattaatgaatgaaattcctgtaaaaaatactgacaaaactgtggcaaacttaactaaactacgtttaaaactcaatttatttctccttaacacttcttatctttcaacgttttctatattaccgaagaaatattacagccttgttttaaaatgactactataaaattaagcaatgtaacaaaatctgctatttcttgtaaattttgcttaacttgaaaaacactataattttctatatgcttaatacattaatttaggagttttttattatggataagatagatagttatgtacgccactttttaatattaatcgcgctaattttaggactctcgctcgtctcagaactgcgcgaaattattgcctatgactcatctaccattggcattatctctttaaccactgccattatctgcacttttgcttcgggcattaccttgcaatttcacaagcttaattggcttacgatcagtttaatcttaattctttctgcaatcgtaattctattctggttcaaaacctatacttttggtctcgttgtcagcatttttctgatttataacatcattgtatttttggtttgtgttactaatataatttttcaaaagaaggttgaatagttaacttctatgtcagtcgttgatctctataaaaactcagcttaaattgcctatctttatgaaaagcataaattaggaaggaataattatgactagcatcattgtgtttatcgctgttacaattatggcgatattcacaggaattatatttatacgcgtggtgctagttaaatcgttttagttaataaaaaagtccaattagactagactcaagttgtaagtaatttaaatagaaaagagtctgatctaattgaactatctcaagcttaagcgtttttctcaccatttacaagttagttttaatcggttaaatgtgatttgtcgctcgctgtataagctttatgcgcctgatggacttaaacatcgtaaaaatgttgatcagaccaagcttcctgatagttctatcttagcgatgctcatttggcaaactgaaattggaattgaatctcaacgaagattctgtaaattcttcgttggcttatctcattctcgttttaaccgtcgagctcgaatgctcttgcctctaattcgttgtatccgtcagggttggaatcaggaagtaaaggtaggtggagaattattgattatcgacagttttccgattccagtttgtcagcctgttcgcaattatcacgttaagatcttccgtggcatagccgatattggttataaagcgacgaaaaaaatctactattatggcttcaaagtccacgcaatagtgagtgatgatggctatctgcttgactacgcagttactaaggcgtcggtacatgatgcaaaagagacggtagaattgatgatcaatgctcatccaattaaccattatcttttaggagatgaaggctatttaggaaaagacttagcagccaagctaaagcgtatgggatacgtgctttggacaccatatcgtaaaaacatgaggggtgctaaaaagcataatgatcatcagttaatggcaattagaagaacaatcgagccaggagcttagtaggttttcaacaacggctagaaatagctattttagcttataatatggcatattgtctagaacgatttaactagcaccacgcgtatatttataaaattatcaatgcgcatgtaacctataaaaagcattatccttatcgtaaattagtaagggtcactttaatcagtctcccatggatattttgggtcttcccgtttactctagattggagtacccatatcactttagtaatagtcagaattccatatacaatcatctggagtttgttaactgcggtaggattgtatattgatattaagatgcaaaataaatatcgacatcacaggaacaacaatggacactaaaattttaacagcaatcatcttaattatcgtagtaattgtactagcctactcaccattttataaaaggtatcaactattttacttgaataaagtaggctattgggatatcctaatccaattcctagtaattgcaggtatcaacttattcattggattaaaatacggtctaggtgccctgtttctattgattgttcccgttccactagacattattttcttaatctcaatgatttattcttactttaaaattagaaaattgaaacgcaaataactcaacaaaacggagccaactaaagcttcgttttttgattaatcttatttttcttctgtttcggcgttagattcaaagccatcgcagccacgacaaccaacactgatccgacccaatccattggcatcattactaagttaaagaatattacagaacctatcgttgcagaaaatggctcaaaagcatctaataaacttacagttgatgggattacataccgcagcgcgtttgccataatttgaaacggaataatcgtcccaattacaataactgccgcagtatacagccaaacttcaggcttattcggaactgcatgaaattgcggatcaattatcaacaaactgattccagcaaaaatcatcccccaacctgttacaaccatactagaaacttttttaacaatgttaactggaatcaaagtataagcagcctcaccaaaagcggataaaatgccccaaaatagtgcaactggcgtaatggccaaatgattaaattgcccatgcgttgacaataaaaacactcctaaaaaagcacataacgccgctatgatatccaatctacgcataacttgcttgtgcgtgatagctaaatatcccaatacaaaaaatggcccaataaattgcaagattgtcgcaatagaagcattagccacttgaatacacataaaataaaatagctgcactggcaataatccaaatatgccataggctataataaccaaaacattgtgcttatttttcaacgtagctattggtttttgctttaaaaatcctgaggcaattaataaaactgctcctgaaataatcaacctgacttgggttaaccacattggtgttaatttaggactaatatcaaacaatcctttagcgaataatcctgacacaccccacattacagctgccattgccgctagaaatgtccacaatcttcgtgtttttgctggtaccatctagttcacctttttctttctcattcacctaataattaaaccacaaaaataaggatacctactgggcatcctcaactttattgatgagtttttttaactttctttttcttaggtgaaatattcaaggccatagctgccagcacaactaaaatcgaaccaatccagtccattggggtcatcaccaaaccaaagcaaataactgaaccaacggttgcagaaaaaggctcaaaagcatctagcaaacttgccgttgatgccttgataaagcgcagcgaattagtcattaattggaatggaatcagggttccaatcacaatcactgccaccacatctagccatacatgtggcgtattcggaatatgcggcatctgtgggtgcacaatcattaggcaaattcccgctgacagcaatccccaacctgtaacgactaaactagaaactcgcttcaacacactgattggaattaatgtattggtcgcaactccaacagctgaaagcaaaccccagaatagaacgctaggcgttaaagcaaagtgattaaaacgcccatgtgtcgccagcaatactacgccaataaaggcacagatggcagcaagcacatctattcgccgcattacttgcttatgcgttacagctaggtagcccattacaaaaaagggaccaacaaattgtaaaatcgtggcaatcgaagcattagcttgttgtactacaataaagtaaaacaattggactggtaataaaccaaaaatcccatatgcgataatcgtccacgcgtcatgcttatttttcattgtagcgattggcttttgctttaatacgccagctacaattaacaaaataatgcctgaagttaccattctaatctgtgatagccacattggtgtaatctcaggactagtattaaataaactcttagcaaatagacctgatattccccacattatgcaagctaatccagctaaaaaggcccacaggcgccgttgtttttgtgtaaccattctttttaatccccaacttttctaaaactaacatactctatcataacaaaaacgggctagcttgaactagtccgttaattttttattcatcatttttcttaattgggtttctgctaggcattagctgcatgaatgtagcaacaataattaaaaagccaccaaacatgtccattgggccaaagtccgcatgaagcagtgaaactgacaggatcgttgcaatcagtggctcgaaggctccaagcatccctaccgtacttggttcaatatactgcacactagataagtacattgtataagctaacaatgttccaccaataataatataaacaattacccaaacatcaactggtgcaagttttggcattggttgagtgaagtaaattggtaaaaaggcaatgcctgcaaccaacattgctgcgccgattactggaatcggcccatactttttgaataatttcccaggtaatactgtattaatcgcttcagaaaaagccgcaattaagccccagaaacaagcaagcggtgataaagcaagttgatcgaatctgccacctgtagccaagatgaaggttcatacaactgctaccacaattgaaatcgcatcaattcttcgtggccacatcttacttctcaatgaagaatatataattatgaaaactggcgctaaaaattaaatcaccgtcgctgtcggagcattgctgtacttgactgctacaaagtacgataattgtgagctccccattcctaagaaagtaaaaatgatcaacataatgattacttttttatcatgtagcattgccttgacttggtccaagtatttccaacaagcataaatcataagcagggcgcctgaaaaaagcaaacgcagacctacaagccaagcagtatttacattagtgctagaaaataaaaattcaaccgccgtacccgatgcaccccaaaaacaggcaccgacaacagctaaagtcaatcctttataacgctaattcacattcacacatcctttagattaatgtttttcattgtaacatgggctaaaggaaaagttcaatgcttctaaagttgatttaatctatataacgtataacctgacacgctagccaataagccgattgtaaaaagcaaccaagattctggatgaaaggcaattaaaacaagtgaaagaaagcctgctgctaaactagaattgcgttccattcgctttttgccaaaaagcagaccacacataatgccaaacatagttagcacataaaatgagtcaactaacagtaacaaattctcaataattgctagatcacttggctttacttttacactcaaatcagtaaaaatctgagcacagccaaaaaataccatcacaaatgcagctaagatcgtgataaagctaatcgtacgaaaaactgacttcaccttttgagttggcgtttcatcgataaaggtttttaagaaaaactcgtgatctttttttgctactacagctctgcccatcttcttgtcataccagttcaatagaccagaaccaattagcataatagcaatcacagcaaactggatgacaattaaacgcatgaaaattggaaaggcatagattaccgtcaataacaaaattactacatagatcagctatgcataaagaaagaaatgcagacgctgtttatttttgaaaatagtttggaatgtttttgaattaggatcttgcataagacttctccccactaaatcttattacgaaaactcaaccagaaatttgccccactgagaatcaagccaataacagaagctacttgcatgcttggctgcatgaaaagcaagatcagtgataaaacaacagttaaaacgctagacgcacgaattaatttacgatttccacctaaaataccgacctccacacaaaagagtagaacaacatataggccatcaccaatcagccaaacattttcaaagagattggcaaaattaccggtaagcggcttagccaaaatgtcagtccaaagctgacgtgcaaaagcaatacttaaaccgatatttgcccaaaagagcaagaattcaaataagtgaagaaatacgtttttagtaaatctaatactagtcagtgtttcccagaatgtatcgtgttttttaatcactatccttcgatcaagaaaggcaccaattgaatagtaaatcagaattgcaatcccttgaaatgcaatcaaatgcataaaaactttaaagtcaaacatcaatgtgaatagtaaaactactacataagctaactcaaaatataatacacagcgactaaactttcgctcgctaagccagtgcttcaattctcttttattcatatgatcactaatattgccattcatattctcaccatcttttaataattatctaattatgcaaaaattgtataatgatttcaaaattttgtctagtccttttataattgatttagtaaatatttttcgaggtaaattatgaattatcccattttaattgctattttgatcttcttgctgtgctttggccgattcatttggatcattactcacgaacgtcgttccttacgcgctggagttagcttagttatcaccttatttagttttttttttaggtgtagtcattctggttaatatcgctgaccttgatccacattacaaagactggattttgccattatttgtgattgcgctatttgctgtgatggctggaacgattatctttgcattaactttgatcattatgtttttctacgatggcattaaaatcattatcaaagaaggaaaccgctggacaaattatctttctctgggcatggggatttccattatcttcttcctatttttatatcctcttgtgggacgaattagtcatgatagctggttaaagtatccctatatttttctatggctagtcatcatctacttagtcactatcatgatgatgtatactttaacttcttggattaatttaattaattggcacatgccgcacttagactacatcgtagtgttaggcgctggcattatgggaacaaaggtaacaccacttctggcagctagaatttcccggggaatagaaatttatcacaaaaatcctggctctaagttaatcatgtctggtggccaaggacctggtgaagacattcctgaagcagctgctatggctgaatatgctgaaaaactgggtattaataaaaacgatattattatcgaaaataaatccaaaactacccagcagaacttgcaattctcacatgcactgatgaaaccaaatagtcgcttctgtattgtaaccagctcctaccacgtgtatcgcgctctggttttagctaaacgtcaaggactcaagtgtactggttatggtgccaaaactaagtggtattttactttaaatgcttttgtgcgtgaattcattgcatatctggtaattactaagaaaatgcaattgactatcatcggttttctagcagctatcatgattgctgctgtcgcatttcatttttaatttattgcgttaagttgagaaacttagcgttttttattgatttatcttttaatttttttataattatagtcaaatctatagaaagcaaggtgtaactatgaggattcgtaaaaacaacttgtcaaactgtcattagtcaggatgacgagtcctgactttttcaaaaaagtaggttacttatgtcagaaacaaaattcaataaaactcttcttagtgtcagtcatgtggatttttcctaccctaagcgcaatttattcaccgatctaaatttttctattgctaatggtgaacgtgttgctctagttgggcctaatggaattggtaaatctacactaattgacctaattcgtaagcaaatccaaccagatgatggacagattatttgtcacggtgaaattaattatgtacctcaagtcaatgatcaaactgtaattaatgactcaaagagcgctggtgaaaagcgattagctttaattgaaaatactatttggcttcctggttctcttctcttattggacgagccaacagtttacttagatgacacaaatatccagaatttactctacttactcaagaattatgatggagcaattctagtagctagccatgatctggattttatcaaccaactatgtgagagaactattattctgcagccaaataatgcagtttattacccaggaaattacgcacagtatctcgaacaaaaacaattagataaacaagccgtacacaattttaacgaaaagcgagatatattaaagcaacaaattactgaaaaagtctctactttaaagcaaaaaagtactgactataatcattttgctaaaacacaagacaatactggtcgctatccttcacggagccatgatcatgtccaaaaaggattaaatagtcggcttaagcgagctgaacgtgaactggctgagcttccagagaaacagcatctatatcaacatcaacttaaacttcctgaatttaaaaagtggccgactaaaatacataattactctatcaaaatagatcaattactcagtccccaaaataagactttattatctaatacacagttaaacttgcaaacagccgatattattggattaatcggccccaacggctgcggtaaaacaacattgctcaaatatttagaacactacattaatcagcagcaatctttgccaccagccagctacattggtttaaatacgactaaacaaaagaaacctgccacagtagcagatttctttcacgagactattttgagcaaaactgaagttaagcgtcttttagttaaaatggatatgtttgtcgatttgactacaagactcacggatttgagtggtggcgaatttgctaaattagcattaatcaagcagctataccttgaacaagaatctattctattacttgatgagccgactaactatcttgatccagaaagtgtgacggccttggcccaaatgctaaaacagtcgcatctcacttgtattattgcatcccacaattgcaaatttttaacccaattttgccaacaaatctataaaattaagcagcaaagactaattgaattgcactaaagcatttctcttaaacacatatttgctaagcatatcctttactatccccatctatattaatgaagatcacatttggtgctgcagaagtttggtgcgtttctttattatatttaccaccataatactcataacgaggtttccccttgccaaaaggatctattcggcaaagaaagatcacatatgtcgctttgaattctttttccggagagccacctagcccgccatagattatttcttcctgataagcgttggcaacttccagaatgttttctcctggttcttgcgaccctacttgaattattaacccgtatttattgcgcttcttgtctcgcgcaattacatgtacgattgctttttcatctaagacatttctatttggatcatcaagtgattttgcttcctgaatatcgagttcgggaagcattctttgtactgctggaagaagctgctcattatacttcttcataattcctgcagccaagtgatccaccattgccggtgacatttcattttctaacataaaaaaatcctcatttctaaaaatctgagagttttatccctctattacttattacgcaaaaaaacgcaaaaattttttcagaaaatgaagatttttcaattttttagttttcttttctaaaaaatggactgagtagcgatacaagcaggccgtaaataaaataccagcgataaatatctgccaagtcttgattttgaatccacaaaattattgcaattactgtcagtaagccacctaaaaagattgttgaacccatatttttatcagtaaagaagctgatagcagcacctaaggtaattaacgctaccaaactataaatgacgataatcactggtcctttagtctgaacgttaacatcaagcattggtgcgttagtaaacagctgccacacgataaaaccagctaatgcaatgccacatagcaatactagtaatctaaaaacaaaagttaaagtctttttcattatttttctcctgtatgcataataatactagtataacagcaatatcgcggcatacgaaaagcgcttggatttttccaaacgcttttttactattcttttgcttgcataaattgttttctagtgatgtatttgattgatttaacgtattgccccttgtgttgaattgaaatatattggcctgatggatcgtagccgccaacctttttcaacaataaattctttttcgtcttaggattatacgccttcacattgtaataccgctgtgtgcctttatctacttgagcatagcttgtttcctgggaaatgaatggattcaatctatcagtaaaagagttatgaaatgaaaaaatgcagattactcccactactagcactagtgccgttacaaatgcggttttaatagtacttttattcataatattcaccttcatcgttcaactattgttatactaaaatagtacactcattcaatgaatttagcaattgttttcatgaaaaaaacgcttgaaaaattccaagcgtctttcacctaagccaaaaatctttttatagcttcttctacactagcattcaatgattggtgcttcgttgcagcataattagccaatttttcatgtaatgaaggatcaatgcgcacattaaaattacctttaaaaggtttctctggtataactccatcttccttacagctcattagataatcatcaatggctccttgaaaatccttctccaattcatctattgtattaccttcgtaagaaataagactcttaatcccctgaaccttaccaaaaagaatcttatcctccaaagtatattcaattgaaccttcataacccttatacttcatatattgattagtttttttcatctttattcatctctttgattttatcttgaatttgtttgatttgatatggtaatagttcttttctaggatgtggtttatgaagaatgagactgtaaaatagtttgtgtaaggatgaatgattccttaaatttatttctttaaacattagaaaaaggagttcctttctcgtatgattggtttgaacaaaaaaacacatacagaaagaagaactccttcatgaatgattttaccaaagattttgctcaagctctattcaatccagacaaaataaatgatttattgcgcaaagagctacaacaggctgttaataacttgttagaagctgaattgaccgcctttctgggctatgatccctatgccagaaatggctggaatactggcaactctagaaatggtgcttatttccgcaaagttgatacgcaatttggcccaattgaagtgcaagtgcctcgggatcgcaacggtcaatttcatcagcacacgctgcctgactacaagcagcactcggatatcttggaaagcatgattatcaagctttactccaagggcgtgaccaccagggacatagccgatctaattgaaaagatgtatggcagccattacagtccagctcaggtatcaaatatttccaagcagatgattccaaaggttgaggcttaccacaaacgcaagctaagcgacaagtttttctgcgtctatttggatgcgacataccttcctttgcgccgagaaacatttgagcgtgaagcagtctatattgccattggcatcaagcctaatgggcacaaggaggtcattgactactgcattgcgcctagcgagaacattgaagtctggacagagatgcttcaaaacatgaaatcccgaggcttaaagcaagttgagctttttctttctgatggtgttgttggcatgaaaacagccttggccaggacttatcctaaagctcattttcaacgctgtttggttcatgtcatgcgcaatatctgcgctaaagtacgcgtcgacgatcgtgaaaagatcatgaacgaattcaaacaggtgcatcaacagacaaacaaagaagaagccacagctgtcctgcatgacttctataccaaatggggcaaggtttacagccatgttatcagaagcttgaaagacatagaaccagatctgctggtcttttataactatcccaagcagatcagagcttcaatttattcgactaacatgattgaatcatttaacaatgtgatcaagcgcaaagctaagcctaaggcagagtttccaactgaacagtcgcttgatgcttttattggcattcaggcaatgagctacaatgaccattatttcaatcgaattcataaaggctttggtcaggttcaggacaccttagaatcctactttgattaaataaataattaaaaaatcaatttacgagaaagatctatttacacaaaagatttgacagtttctgaagaatgatccgatcactgccctttttaaaaataattctagatccactcgtttttcctttattatcgagttgataatctagttcatgcaatagtgttttagcatctttaaagtcaaacgttcttggatgactatataactttattaatagcttttctaatttacccacgttatcctcacttaagtatataatataatatatcatttgtaactaaatttgcaactaagacaaattatacctaattcgctaaattcacgctactaaaaaagcgcttggaaaattccaaacgcttcttttgtttaatcatctagacctaacttcttaaagatatcatcaacatgacgcaaatgatagtgataatcaaatgcatcatcaatatcttccttggataggtaattcataatttcactgttttcaaccaatggcttaaactgcttttgctcattccatgatttagcagttagcttctgtaccatatcataagctttttcacgagatagacctgcttcatcgatcaacttaagcaacactcgttgagagtaaattaatccatatgtacgatccatattcttaagcatcgtttcagggaatacatctaagttagtcaaaattcgattgaagcggtgcaacatatagtcgacgccaatagtcgtatcaggcaagataactcgttcggcacttgaatgagaaatatcacgttcatgccataacgctacatcctcgtatgctgtaacgacatgtccacgcattactcgagccattccacagaggttttcagatccgatcgggttacgtttgtgtggcattgcagatgatcccttttggccagcgcggaaatgttcctcaacttcatgaatttcactgcgctgcaagccacgaatttctgtcgcccaattttcaatactagtagcaatcaatgctaatgtcgcaatgtattctgcatgcaaatcacgaggcaatacttgactagtaattggctgttgtgtcaaacctaattgcttcattacgctagtttcaactgcaggtggaacattagcaaaagtaccaacagcacccgaaattttgccagattcaacgccttttgcggcatgttcaaatcgttcaatatcacgattaatttctgcgtaccagcgagcaatcttgagaccaaatgtagttggttcagcctgaacgccatgtgtacgtcccatttctactgtgtacttatactttttagccttttctgcaatagttgcttttaattcgtgcagatcttttctgataatctcatcagcttgtttaagtaagtagccttgagcagtatcaaccacatcagttgaagtcaaaccaaagtgcacccattttttctcagggccaaggctttcagacacagttctagtaaaagcaaccacgtcatggtgggttacttgctcaagctcagccacacgctctgcagtaaagcttgcattcttagcaatcttctccgcatctgcttctggcacttcaccgagttctgcccaagcctttgttgcggcaatttctacttcaagccaagctgcatatttattttcgtctgtccaaattttccccatttctgggcgagtataacgttcaagcataaattacatttcccatggattcttcaaaacaatagtttgttcacgatctggaccaactgaaacagttaccaaaggaacgccaaccaactctgaaacgcggttcaagaatttcttagcattttctggaagagcgtcccaagtcttaacttgagtaatatcttcatcccaagctggaagttcttcatatacaggcttacatctgtataattccttcaaacttgctggataataatcaatcttttcaccatcaagttcatatgcagtacaaatcttgatcttgtcaaagcctgaaaatacatcaagcaagttcaagctaaggccattgataccagcaacacgctttgagtgacgcaatgcaacggagtcaaaccaaccaacacgacgtggacgaccagtaacagtaccatattcatgagcagtttcacgaatacggtcaccaacttcatcaagcaattcggttgggaaaggaccggcaccaacacgagtagtgtaagccttgcagacaccaattacagtatcaagacgattagcacctataccaatacctgaacaaataccaccagaaatagtattagatgaggttacaaatggataagtaccttcatcaatatcaagcatcacaccttgcgcaccttcaaataaaactttcttattttggtcaagtgcatcattcactaagacagaagtatcagttacatacttcttcattctttgaccatattcatagtatttatcaaaaatgtcttcaaatttaagtgctggcttaccataaaccttagtaaataattcattctttacttcaaggttagcacgcaatttttcttcaaaggtgtctttttcaagcaaatcacaaacgcggattccaattcttgaagccttgtccatgtaagttggtccaataccattcttagtagtaccaatcttgttagcccccttagcttcttcttgatattcatcttgcttaatatcataaggcataatgatgtgggcacgattagaaattctcaagccactagtatcaatgccactcttttcaagattttctaattcgccaaacattacttctggattgattacgacaccattaccaataactgtattgtccttggctgcaaaaataccagaaggaattaaacgcatcttgaaagtttgaccattaatatcaatagtatgacctgcgttgttaccaccatttgaacgaactgcaactgcagcatccttactcaaaaagtcagtaatctttcccttaccttcatcgccccattggcttcctacgactgcgactgctgtcatttaaaattcacctcataaaaatctctataaatattacgtatgctagtctagcaattaatttacaaataatcaatataaaatccgaattattttatttttaaattatttcatagttcgattttcatattgacaaacacaaattattcccatatagtatgtctcggtcaacaaacaagattaaagggagcagtttttaaatgagtaactactttagtatggaagcctttgactatgatgatatccaacttgtacctaataagggtattatcaaaagccgtcgtgatgcagataccagtgtcaaattcggaaaccgaacatttaaaataccggttgttcctgccaatatggaaagtgtcattgatgataaccttgctatttggctagcccaaaacgattattattacgtaatgcatcgttttgaacccgaaaagagaattaccttcatcaaaatgatgcatcaaaaaggattatttgcatctatttcggtcggcattaaagacagtgaatatgattttattgatgaattagtcaaggaaaaccttaaaccagaatatattactattgatgtagctcatggtcactccgtttacgtgattaagatgatcaagtatattaaggagaaattacctgattcatttttaacagcgggcaatattgctacgccagaagccgtacgtgaactcgaaaatgcaggcgccgacgcaaccaaggttggtgtgggacctggtaaagcatgtattacgaaattgaagactggctttggtactggtggttggcaattagccgcattaagaatgtgcagtaaatctgcttctaagccattaattgccgacggtgggattcgtcataacggcgatatcgctaagtcaattcgttttggcgctaccatggttatgattggttcaatgctggccggtcatgaagaatcacctggtaatgtaatcaaaattaatggtaaaacttacaagcaatactggggctcagcctctgaggttcaaaaaggtgcttacaaaaatgtagaaggtaagcaaatgttagtgccataccgtggctcaattaaggatactttaaaagaaatgaaggaagacttgcagtcatccatctcatacgctggtggtcgcgatcttaattccattaagttagtcgactacgtaatcgttaaagacaatatttttgatggtgataagtaattttaataaaatttttgcatttttattattttcctgttagagactgtaaaatagtttgtgtaaggatgaatgattccttaaatttatttctttaaacattagaaaaaggagttcctttctcgtatgattggtttgaacaaaaaaacacatacagaaagaagaactccttcatgaatgattttaccaaagattttgctcaagctctattcaatccagacaaaataaatgatttattgcgcaaagagctacaacaggctgttaataacttgttagaagctgaattgactgcctttctgggctatgatccctatgccagaaatggctggaatactggcaactctagaaatggtgcttatttccgcaaagttgatacgcaatttggcccaattgaagtgcaagtgcctcgggatcgcaacggtcaatttcatcagcacacgctgcctggctacaagcagcactcggatatcttggaaagcatgattatcaagctttactccaagggcgtgaccaccagggaaatagccgatctaattgaaaagatgtatggcagccattacagtccagctcaggtatcaaatatttccaagcagatgattccaaaggttgaggcttaccacaaacgcaagctaagcgacaagtttttctgcgtctatttggatgcgacataccttcctttgcgccgagaaacatttgagcgtgaagcagtctatattgccattggcatcaagcctaatgggcacaaggaggtcattgactactgcattgcacctagcgagaacattgaagtctggacagatatgcttcaaaacatgaaatcccgaggcttaaagcaagttgagctttttctttctgatggtgttgttggcatgaaaacagccttggccaggacttatcctaaagctcattttcaacgctgtttggttcatgtcatgcgcaatatctgcgctaaagtacgcgtcgacgatcgtgaaaagatcatgaacgaattcaaacaggtgcatcaacagacaaacaaagaagaagccacagctgtcctgcatgacttctataccaaatggggcaaggtttacagccatgttatcagaagcttgaaagacatagaaccagatctgctggtcttttataactatcccaagcagatcagagcttcaatttattcgactaacatgattgaatcatttaacaatgtgatcaagcgcaaagctaagcctaaggcagagtttccaactgaacagtcgcttgatgcttttattggcattcaggcaatgagctacaatgaccgttatttcaatcgaattcataaaggctttggtcaggttcaggacaccttagaatcctactttgattaaataaataattaaaaaatcaatttacgagaaagatctatttacacaaaagatttgacagtttctcctgttaagaatattacgataatatagtattatctatcttttttcgatagaataatataggtcgagttattgtagggtagtcaataactcggctttttttgattattttttaaaaacgattggacagagttttaaattgtgttatactagttgtcgttgatgaatgcgcccttagcgcaactggatagagtgtctgactacgaatcagaaggttgaaggttcaaatccttcagggcgcacttaaaaacgggaaatggctcagtttggtagagcacctggtttgggaccagggggtcgcaggttcgaatcctgttttcccgataagttagccgcacttcattgaagtgcggtttttttgtgtaaaaaaataagtattccctcggaaatacttatcatgctatgcccctttagtagctcgtctaaagataatctgtgtatctgaatctacatatttcaataacggtaaatcgtaatccttaacctgggccaaaacatttactttctcattgcatggcaaatcgcgtttagtaatctcgatttcgccttcataacgcggatacaaatgattatcaatcgtcacgctgccagttggtctagcataaatattatcttgcggctctgttgacaaaaacatcttttttctgctttcctttaagcgaactacgtcacgcgccacatctggacgattatgccaatcattgccaaacaattctggtatatcagtatctaaatgcagtgtaattgcaccctgtttttgataattagtaatcgattcaattgcatccctcgtaagttgcggatctcccacaaaaatgtgatcgcaatcataatctttcaattctaagatcgcagctaatgggttttcatatcgctgcttctccaacgttggcaatcctgcaaaaattggtccacgcaatttgccatttcctgaaataaaggctgctgttttcaaaccatattgcttaagccactcattcttcttttgcatccagtgtgcatcaagacctgtttcaggacgtgggtagaagttatgtcctgctgttaatttttcaaaatttgcattgctataacgcagatcatcaatattttgttgcgtaataatgctggcatttagaactatcggcatttctttggacaacttggcaataatatcagtagaaaatccatgatctactctaagaccagttagactcaaacttttaatttgctcaacactattgacattaatacccaaatcttgcagatcatctgccgtgacatctgcaataattttcaagtctagtttttgacaccaattagttaagtccgccagccgatttaaaatcgtctcactatcagtatcaggtacagctagctgagtaaaaacgcaggtaaatccactattgcgcatcgtcagcaaataattgtaattctcggacgtcaaatcgtgtcctagataaacagaaaatcctaacattcttattcctctaaaattaattaatttcttttattatctataacttaaacgctttcctaaatatcttactacattttttgcttgcttttttctaaaaaataatgttaaatacatataaacaaattaaaaagcgatgaaaaagacgagtaaataatctaattctttccagtgaattagtgctagtgtgaaactaatagaccctggattattgaaaaacacttttagcagctcactgaaacaacaattcttagagtaggttgagacgtctccggtacgttaccacgccggtggagcatgatagtgcttcatgagtcggtctattaaaatatagacaatgtgggtggtaccgcggaaaaaagcctttcgtccctgtttttttagggagcgaagggctttttctttgctctaagtacattagaaagaggacttatattatgacacttattttacctaaagattatcacccaacattaactgtgcgcgacactgaagctgcgattgtatttattcgtgaaaccttccaagataaattggcagaaattctcggtttacaaagaatgtccgctccaatgtttgtcgaaaaaaagaccggcttaaacgacaacttaaatggtgttgagcgtcctgttgcctttgacatgaaggcaatgcctaaagaagatactatcgaagtagttcactcattggctaaatggaagagattggctttgaaacgctatggtttcggaatgcatgaaggactttacaccaacatgaacgccatccgccgggacgaagatcttgataacttccactccatctatgttgaccaatgggactgggaaaagattattagtaaacaagaacgcaacaccgacacacttgaagttactgtgatgaacatttttaaggcaattaaggcaactgaaaagctggttgctgcacgctacccaggctctacttatcgcctagctgatcacgtttcatttattactactcaagaattagaagatcgctggcctgatctttctccagaagagcgtgaagataagattgctaaagaagaaaaagccgtctttattatgaaaattggtgacaagttaaagcgtagtggtgaaccacacgatggccgtgcaccagactacgatgattggcaattaaacggtgacttagtcttctggtatgaaccgcttaacagtaagattgaaatctcttcaatggggatccgtgttagcgaagaaagtttgcgtgaacaattgaaaaaagctcactgtgaagaacgtgagaaattaccattccaccaaatgcttttgaagggtgaattaccttattcaatcggcggcggaatcggtcaatctcgtctctgtatgttgctgttaggtaaggctcacattggtgaagtacaagcttctatttggccagaagatatggttgaggcttgtgaagctgacgatattaagttgctgtaattttaagatttttttacataccaaaaaagatcctgcaaaatgtgatacattccctgtcaagtagacagtagaattacataaagcttttattcctcagttgattaataatcagctgaggattttttggcttctcttattttcttttcgtgtattttttgccagtatttctcaattcgatgatttggtgcaatagggcaattcttaatattgcctttcatcgcttctttgcgcatttcaccagcagttaaaccgttaaaacgtttctgtggatcttcattaatgtagtaatctattgtcttacaaatagaatcattaagttcatcataactggccacttgaggatgaagaataactcgcatttctttgataatgccttgccagccttccattggaccattatcaatacagcagccaacacgagacattgattgcgtcatgccttggtcttctaattggttttggaaaggtgcgcgagtaaattgaaaaccacgatcactatggaaaagcggatgagcattagggtatgctttaacagcctgcttataggctgcttgaactaaagcagtatcgtttcgtttactaattgcgtagccaacaggatagcgatcatatagatcaaacacagtacatagatatgccttaggcaggttagcagcaacgacttcagtgatatctgtacaccatttttcattaggtctagatgcattaaagtctctttttaacttgttttcggccgttttctcaggcgttgtatgcttgaactttagcttctggtatctaggcttttgtgatctaatgccattgatacacatcaagcggtaaacagttttatgataaaccggcttttcatcagacatctgtcgattaactgccatggtcatcttttccgtcccaaacagactgttgttagacttggttatttcaatgatctttgcttcaatctttttgtctcgttcttcacgcttactcggcttgcgcttaggatcaaagtatttgtaataagctgagcgtgctattttagcccatttgcacattaaatcaatcttccaattgtacttttgatggcagtcatggattaactgatatgtttcttgtttccagcgtctttttattgcggcttgtctgtatcttggttgtccggcaagcacatcctttctaactgatctaatttttttaggaattcgttcttagtttgttcttctttgagctgacgctctaattccttaatttttcgattagccagttctaactcagttagctcttctggcttcttatgtctgcctcgtttatctgttaatcctgtttcaccattagctagatatttgtgtgtccagctgtaaacctgctggtaagaacaatcaaatttgacagctgtttgagtgtaattcttgtcgtgattaagacagtattgaacaatctgaattctttcttgctgggtagtttttcttcttgctttagtcatatagacctccggatggggatcatagtcccgattttctatatgactattatacttggaaacccattctgatactgttccattgcttctaatgccatatttattagctaaagaaggtaacgacattttgccagctaaatattcttgaacaaccttttctttaaatgccttagagtaatgattattgtattgagcattacttagaagggtatcacgattgctttgatattgatgaacccatcttcttacttgcatcgctccacttttacttggcatcttaagccgtttagctatttcaacgctgctcctattaccattcaagtattgttcaactgcccatatcttttgatcgaatgaatatttactttttctggacataaaaaatcccacctccatggataattgaatactttatgtatttcaatcgtccactttagtgggattgtatcaatgtaggatcttttttctattgattttatttccgttctcttctagaaatccaagccataatcaatggcaacaatacaaagccaaagaccatcatcgcaatggcataccagttaacaccgataacttgccctgctgcgtttactacaccaaattgtgccttccagttatattcaactaacaagaagatcacaatcacaccagataaaattggcacaataacatcagtcataacgctcttattagcctttaagatatcttcttttgccttaccacggtaaaattgaataactgctagaggtaccacgatgaaacctaagaatctaaccatcgcgctcaaagtaatcaagttgaccatattgtattcaaaggccatcggaatcaaaattgccaagccaacagagataaagaaagttctaattgggaagttattcttagttctcttagttaaagcttgtgacatctgaccctcacgagccatagcttccagaatacgtggagcattaaagctggaagctacgttgatcccaaacattgaaaccaaggcaccaaccaagattacatcacgtaagatttcattattaaaaatagccgcaatcgctacaacttgcttagttgtcattaaagcacgtggattaagtaccatcgctaccgctacaacgccgatatagacaaccgcaataattaagattgccaatggaattgctcgtggcaagttcttttcagggttcttcatatcttctgaaccagaagctactgattcaaagccggtaaaggcatagaaggctgaaacaattgacatgacaaaggtagttgtagttaaagttggcacaattttctgaccattctgagtcaattgatctacttgccctaggttgcttgatgcaccagtagtaattaacaaaactactccagcaataataattaataccaatgcagccaacttaccgatagtagctaaattcattacatacttaactactttttgaccaaacaagttgatcacggtaataattgccatcaagatcaaaaagccaattgtgacatttattgccttattgggatttccgccaaaaattgaaatagttgacttaattaccccaacagccattacgccccaagctacactggctgagaagtaacgcagaactcccatataaaagccaatttttttaccaaaagcggccttggaataagcataggcagcaccagatttagtgacatactttgaagctgccgcaaacgaaatggccagaatcgctgcaaaaattgccgcaattaaatatacaactaaagctttactaccggcttgctgtaccacactaccaggtgttaaaaaaatacctgaaccaataatggcattaatcgctaacagcacaattgaccaaaagcctaatttatctcctgttttttcagtcatctatttgcttccttactttgcattatcaacaacaaacttaaataagttattcataaacgctacatcggaattacggtgcaacatttcagggtgccactgcacggcaatgacattaccttgtttattttctagcccttcaaccacaccatcaggagctgttgccactgcttttaaatctggtgcaacgtctttaattaattgatggtggaaagaattaacgcgaaattcagttttgcccaaaatttcagccaatttactatcagcttccacttccatactatgagtaggcaaagttggcgtatgaccttgcatgtgtttcaaagtaagttcttttctgtatgaaagatcttggtaaagcgtaccgccatgagccacattaataatttgagcaccacgacaaatgccaagtaccggaataccattttcttctgctaactttaacaagcgcatatcaaaatgatcgcgttcaggccaagtagcaccaatcttttgcattggctcctcaccataaaaacgtggatcaacatcatgcccaccagataagatcaagccttgaacatgattaagctgttcacgaatcacctcatcattttcagtaaatggaataatgtaaggcacaccgccattttgaactactgaatctacatagtcttcgttcacataactacgatggtatcctgggaaaattcctctatcgtcaataattacagaacctgagataccgataattggttttgtcatttatgctcctccttctgcttactttttgtatgtaatattatagagaaatttatgcaaaaagtacaattaaaaaattgcattgttgtctataatttttgcatatctttaaatatagtaaaaaacagcaagccttatttttagctcactgttttatgctatttataccaaattccaaaaaggatttccattacatgctaaatatgtttctagccactgtttaaaagagaaatcaaaatattgttcctctattccaggatacgttagataggactgtttttgattgtagcgatctaaattaatgcccatttctccctcgtctcttaaccaaagtataggtagataattaggtgttttaactaactgatttaagacatactcaatagtgtaaattctacaccttgctccacctaattcgatgccttgaaaagaatcaatgaataattctgcaccgttagcctgtatccaaaactctatcaaatcatttgggacagatatgcctgacaacctatttattttattttcagctactggcggatttaatttaaatttacagtaatagacgccaccaaaaccaaatattggtacgtcgacactgcattttttactaatcaaatttatattatctattatattatccattttaataattaataaaccatttagttataagcttatgtgcttcaattggtactggcattaagttgtcaaagtcattatttccaccataaattctaggtcttatatgatgaacttgattttcagcccaatactcttttgattgattgccataacgctcactaaactcttttatatagtaatatctatccatcgtagtccatactggtgaagaaggaagtctagaccaagtagtattgattggtgtttctgcatcttttttagagacaggatcaacatattcaggaaaattttgaccaattttattttgtaaataaatagaactaagtgaaattggataagtagcgctatttccattatagcctaccattccccatgctcctccaacagcaaaaaatgtgtaagtgtcaatgtttttgcggtagcctttaaaccattagtctaaccttaatttcttaaatatttatatgacttaaatttctgcttagcttgcttaaataactattgccagctacctgtgcggttaatgcgccatgctggatgcctaaatgaacttcatgacgcttctttaagctgtcacgggccgctgcttttaattcctgttcagtcaatacagttatttctgaatcttcaaactcgctgctaagccaaaattccagctctcgattcttgatgcagcttaagatcctaagcatgccttctgctccagattttgaccatttcttgccttgccccttaacacggtaggtatacttgcggtggttgctctcgcagcagccaatggctttagtcacagtcagttttcgtttcttaaacggcttaatatcgtcccaatgacgatcaatataattccttaggcgccccagataatcatgattgagctcggtattcaattcatcaattagtcggctttctgcagtggttaggatagttttaactttgtcatagctgtatttgtattccaaagcagaaatcagcttgccttgcaggtcaggcgcaaaatatagcctttctttgattttcttatttaggtgaaagacatccaagaaatgctcatgacgcttgcatagccctacaatgtcatcgaagtctgttttggcatatccagcaccgccatcggcgttgctaagaattacagtatcagaaagatcataagtattggccaggtactccttggcttcgttcagcgcatcaagtcggcttaaagaaacaaattccttggcattgattcgctttctgcgtttcttgcttatattgacaatgccttcacagacctgatagcgatgaaattccaaccggcttttagtgcctttgatcaccacgccatcgccttcaagatacaaaactgggacctttttcttagtgcctgcggcatcatatcttgaatctgcttcttggcccgctttaatatttttcccggccatttttaccaaattgcccacctgcatatggctaatattaaagccagacaggcaattgactgctagagcagtattgcgataagtggcaacgctgcttacttctaagatgtttttgactgctaaaatactgtagcgcttgtatttgtcaaagcccattaattcatccaagggataccttgcttgtttgcctgggcagacatatcttcttctgacatacctaacttcgccaaaagccatattgattgagcgctcattcttcttatcaatctgatagccctgtgctttaaccttggtaatcatttcatcatcaactttagctaaagccaaggccatgatttccttaatcaggtttaagaagaaacagattatttttctttcacgcttaatataattatcttcagactttataatatttgcgatttcagttacaattgaattcataaaagaccagcttctaatgtgttttttgttcttaacatcagactactggtctttttgtttgagctcaagtccaaattcaaaggacttgggcttttttaattatttattcaacttaccgtaaaaaattatacacttagaaaaaatgttgtagcagctggaaatacagcagaccctaacaaaccagtagtaatattgccttcttttacaattggactagctgtatttgtagtaattgggccggacaatgatggttcactatagaattgcaattgaactgaaattgcagcaggagctggaccagttattgaatcaatataaaaattgattttaaattgtccatctacatactcttgtgaagtatgaaatttaacaactgtatctggaatctctgccaaaaaagtatatgcagagtaatggctacttgttgcattaaaattattatgaatttttacagttccattttttaaaatagggacatctttttttacattttcattctttaacttatcttgagctaaagaatgaaaattttgttcattagctattttagcaacattcttatttacatcatttagcgagtcagcctttgcatttgtattgatagctataaagcacacgatagtggctaaaaaagcaaataactttctgtatttcatgtttctttcctcattatctataatttttaacacaattataaggatctttctattattctaccatacaactctatcacataagcaagtgctcccacactgtagcatcagatgctactgggatttacactctagattgatgtatacgaagaacacaattacaatcagaataacatgaaatactactatagcgacaatttaaaatatacagtaaaatctttaaactgtatttcttattctaacccttgttcaaagcgatactgccgtaatacatattccttgaaaaacggtaaagtaaaggccacttcaccataattagtagatttgataacttgatcatctaacaagcgtctacgatagttagcaacaaaattgcttggacggtttaacctttcatgaatttctttaattgaaacacaatgttttgggctctgagccatagctaaaacaaattttcggtcttgctttgacaaactactaagtactttggtataaacattttgctttagcaccaataagtactctgatttaatacattctaaagtgttttgatctattaccttactttttttagcagctttcaaaactaaataacctagcaactgaaaggcatatgaatagcccattgtcatcaacgccattttttcaagaatttttttcgacacttgataacctgattctttaaaaactttactatagctagcttcaacctgtgagagattcaatgctgataaagctattcgctttccacgtagtaagaatgaagttatattttcgtttttcaattcagagatattttcagaaagaccagctatcattaaggctataggataaccctgccgatttaataattgataacatcttgcaaaatctttcaactcctgacatagttttacttcgtctaaggtaatcaacactttaacgtcattttttcttacttcatcaaacatgttcgttaaaatatcttgatatgttaacttactaacgtctgtagaaagcgataatccaaaattagagaaatttagtccttcaatagatttaaatgatttttttagttttgaatctgcattcagatataagctattaataaaagaaggcaacaacttcatccccatggccaaattaacaacaatccaatctggatatgcactaatctttctgtccattgctgtcaaaaagacagttttgcctattccacgcattccataaacaatcgaaattgtatatgaactatttaaattctctattccttgagacacatcagcaattagtttttttcgctgcaaatacactgctggaattcggccaaagctaggattaaacggattatccatattttgtccccaatcattttcttatcaaaaaagcagcaggcttcttacctactactcaattttatttatctttttgatgcttaaccacataaatcagtgccgcaataatcaacactgctgcaccaaccgctactgaaatttgcgtctccggattaatgaacatgaagacaacaattactaccagcataatcaaagcaaagtaatttgaatatggataaagcggcaatttaaacgggtgattctccatcaagtgtggattctttcgtctaaagcgtaactctgctagcaggatcacaaaccaagctaccatccctggcaaaacagatgaactatagacaataacaaaaacattagccaatgatttattcaaaaattgggctaacacattaagcataaaaccaacgaaaattccactggtaattccaatgatcgcatgactaggcacgattctcttagatacgtgaccaaaagtcttaggtgcttcaccttcgtgtgccaatttatacaacattcgacttgatgaataaattcctgagtttgcaccggacaaagctgcagtcaaaactacaaagttaattactgaagctgccgcggtaattcccaccttggcaaaggtcgttacaaacggtgagccaatgctatctaatttattccatggataaattgtgacaatcacaaaaattgccccaacataaaagatcaaaatccgccacaatactgacttcacgcttttaacaatggccttatgcggatcagatacttcaccggctgaaatcccaattagctcaattccttcataagaaccaacaataatggccattgagaaaaagaagcccttgagaccaccagtgaagaagccgccatgactccacaggttagaaaagcctactggatgaccgccattaccaaagccaaatagaattaccgcaaagccaagtaaaatcattaagataatcgttacaaccttgatcatggcaaaccagaattccaaggttgcataagctttcgcactagctaagttagccaccagcaaaaataaaataataattacgccggcaacccaatcagaggtgcctttccaccaaaagcgcaaatactctgttgttgccaccacctcagaaattccgacaacaatgtattgaaacacgtttgcccattcggctaaatagccggcaattggatgcacatgctctgaagcatagtctgcaaaagaaccagtacctggatcaacataaagcatctcacctaatgcccgcattacgatatacaaaataaccccaacaaaaatataagctagcagtactgaaggaccggtccacttaatggttgagctagcccccatgaatagtccaacaccaattgctcctccaagtgagatcatttccatctgtccggctgtcatcgaccgctttaattcaggtgctttcttcgccatttccaactccctttctttagcatctgtaaaaatttcctaggaaatatatctattctcatttatctttaatcactataccttatcattttttcgaacaaaactgtagctgatcgctaaaaagattgcaaataaaatcgaaataatcaaagccagctgcgttgatttgataaagaataataagattaaaataccaatgtaaaaggcaagcgtaagccagctagttactgggtagcccggcattttaaagctgcctaaattctgcttattctgtttgcgataaacaatatgtgctgccataatcatgatccaaacaatcacaaaacaaatcgttgaaacagttgagacaacggagaatatttctgctggcattaaatagtttaaggcaactactacaaataaaattaatgaagaggtcatcaaagcgttcattggaattgctttttgggtcaattcacctagtcttttaggtgcatggccgttacgtgctaatgaataaagtgatcgactagttgaaaagattgcactattagtcgctgacatagctgcagtcaaaacgacaaaatttaaaatccctgcagccgctgtaacaccgatgccggtaaagacctggacaaagggacttgaagtagttgtaatgtgattccatggataaacagacataattgccaacattgagcccacataaaaaaggccgattctaactggcaaagtgttaattgccttaggaatatccttttgcggattagctgtttcactagcagtttgacctacaatttctaccccaacaaaggcaaaaacaaccatttgaaatgataaaagaaagccccaaatcccagttgggaaaaagccaccatgattaactaaattagttagtgaaacataaccgccctttacatgcgtatgaagtaacaacattacagcaccggtaatgattaagactacaattgccattaccttaatcattgagaaccaactttccagttcaccaaataatccgacatttaccatgttaatcaacatcaataagatcacaattactaaagggccaacccattgcggtagccacggaaaccagtatcttaaataaattcctgtcgcagtcaaatcagccatagctaaactaagccagcaagcccagtacatccagcccgctacaaattcggcacgcttacctaaatattttttgattgactctaaaaatgaatgactatcaggatcggctaaaataagctctcctaaagcacgcatcataaaaaaggtgataatccctacgattaagtacgacaaaataattgaagggccagcactatgaatggctgaaccagaacctaagaataggccagtaccaatggctccccctattgcaatcattgttacgtgacgactcttaagcccgcgttttaatctcggcttctcatccataattactcacaccttcctcaaaataaaaaatggagcggcatgttttttaaatgaaacatgttgctccatcaagtttgctttttttgaattatatagtcttataccaattcatgcaattattttttatctaaaaaagatattcccttaggaatatcttcattattagtaaactttaaattggttcaacggccagtaacgtactttaactacgccaacgatactactacgcttaatggttccgatataacggctatccttagaaacgctccggtgatcacccattacgaaatatgttcctttcggaatgcgcccagtatcctgcacatatttaatctgcgctctagtaaagtattgctggtaagtccgcgcccgcatcagtgactgcatagtaaaattctgagtctcagaataaaatgtatctgagccattatcaattaacttcgttccttgtttcaaccaaggttgagcaatctttttattattaatgtagatttgattatttttgctgacgattttttcaccaggcaaaccaataacacgcttaatgtacaaagcacctggttcatctggtgctttaacaatcactacttcaccacgcttgatttgcgcatgacgctcagcgattagccgatcaccattttgaaaagtaggttgcatcgaaagacctgatactgtatcgttgctcaagacgaagtggaaaagcagcagataggcaccgatcaaaataacccagataattaagatatctaggaaaaacttaccccatgattctttttcttcttttttctcagccattatttttctccatttatctttttccacagtttacaactttatggagaaattgccaaattacaaaaaagaggtatttcctcggaaatacctcttttattattaatgactattaattagtcttcttttttgtcttcagttttagcttcgtctgaaacttctaccgttacacccttcttagcaagaacatgagacatcttcttcaagtaaatgttaatgatcttgcccatgtcttgttcagtaagtgagttgaatggaacgattgcgtccaaacggttcaagaattcaggtctgaagtagttttcaagggctgagattaacttgtcttggtcaaccttgccatcttcaagcaacttgtctgagaagccggcgtttgaagtcataatcaagatagtatccttgaatgaaacagttctaccttgtgcgtcagtcaaacgaccgtcatccataatttgcaataatgcgttgaagacttgtgggttagccttttcaatttcatcaaataaaattaatgagtatggttggtgacgaaccttttcagttaattgaccaccttcaccgtagccaacatagccaggtgctgaaccgatcaacttgttaactgccatttcgtcttggtattcactcatgtccaaacggattaagtgttccttgttaccaaataattgaattgccaattgtttagcaagttcagtcttaccaacaccagtaggtccagtgagtaagaatgaaccagtaggtctgtcgctgtctttgaaaatttgcttacgagcaatagcgtcagtaattacatcgatagctctgtcttgatcaataacattcttcttaagtttcttagctaagtccaagttcttttgagcttcatcagcgtgaagttcactcattgggatcttagtcttttgttcaataattgcgtagatgtctttttcagttacttctggagtattcttagaatctacattcttaagttgtttctcaagttcagcaatcttactcttaatttctgaagccttgtcgtaatcctctgccttagcagcttcagtcttcttagcttcaagagctgagatttggttctttaagctcttttcatcagttgattgtacaagcaatgccttcttagcaccagcttcatccatcaagtcgatagccttgtctggtaagtaacggccttgaatgtatctttctgataattcaacagctaatttaagactgtcgtcactgtattttacgtggtggtagtcttcgtacttcttctttaagccttccaaaatcttaacagctacatcagtagatggttctggaacttgaacagcttggaatctacgtgataaagctggatctttttcaattctttggaattcactagtagtagtagcaccaattaacttcaattgaccacttgccaaagctggcttcaagatgttagctgcatccccattgttgttttctgaatcagtagaaccagcaccaacgatgttgtgaatttcatcgatgaataaaacaatgttaggatcgctcttggccttgtcgataaccttctttaatctttcttcaaagctaccacgaagacttgaaccagcaaccatgtcattaatatttactgaaatgatatgcatgttagccattttagctggtacattacctgaagcaattctttcagctaaaccttctacaatagaagtcttaccaacaccagcaggtccgattaaaacaggattattcttcttacgtcttgaaagaatttcaattacgttatcaatctgttcgtcacgaccaattactgggtcaaatttattgttcttagcttcctcaactaagtcaacaccaattggcttttcattgggttgttgtgggttctgttgaattgtttgtggtgcagcacccatgctgctggagtaattaattggaattgaacctgaactgcctttgctatttcttctgctaccaaagtcgtcattaaagaatgagctattcaattcgttaaataagttatcaaaatcattgtcaaagtatgccatatgtgcaacactccctatctcaaatttacgtctttagcactctagcttatcgagtgctaactcattacatttaatagtatagcaggttatccacagactgcaagccaaaaaacaaaagttttacacattttcctttatttttgtgatttttatttaaaaaagcactacaaatgctgcaatataaacatttgtagtgcttcacaaattataaagaatttcttaagatgggcaaaaattgatgattattttgcttaaaactgttgaattttaaggaagttttccacagataagaataagtttattaccataaactatttctgcctacctctattattgcccttttgcttgtccagtattttgcggttcgctcaactttctcggcccaagaaaatactgtttaattactttgattacctgcttattctgaggtaaatccgagtgatccgcttctacacccgttactgtcattgcagtatagctcttgacttgattctgaaaaatatattttccggctgctacgctagcttctggtacaattccatcagactcataattttttccaccagataaggaataaacaatcaagtttttcggtagtttatctttgttcttgataaagttttctagcatttgcgttttatgattaatatttttttcaccaaaattatatggcgttcctagcgtcatcagacgtttgattttaatttcatcagaatagtaacagtagtaatgttctaaccaataggtccagatcaagccaccgttagaatgcccaaaggctttaaaattattaaacttatagctctctgataaggcataaaaggcttgatcaaaccagctggcttgcttcttaatattgctataaccatcgtgattattttcaaaaccgacaataatgaaaggttcgttgtcgtttttattaattttgcctgaatatgacagcgttccattcgttgaaactttaattttaagcacgctatgcttagtcggtgtgttctgatttagctgcttcactaattggttaaaacgttcagtcgttgcactagaacctggaatcataattactggtgacaaaagcgatttgcgtctttcagctctagcgtggttatcagccttcatccaagaataacccggaatagccaaagctactaataagactaagacgattgccaaccatttaaaattaggattttgaactaaattaatcatttttttcttcataatcctttagtcccctttcaagtcgcaaacctaatttcatagttggaataaacattattatatccaaaatgaataacaaaatagaaaataccaagttgctccaatcaccattggaaccaaagaaagagaccaaaattcctggtgtcccacttaaaacggggtaagcacaaggttgaattaaatggcaaaaaattgctccagcggctagtagaatattaataattggaataatcacaatcgccggcagtaacaatggatttaaaataatcggcatcccgaccatcatgcctccagttgagcccaaagctgctggaagcaggttaaccttggcaatattttcactatccttatttttactataaattaggataattacaatcatcgctaaaacaatactcgcaccacccatttctgcataaggataaaacaaagaactacccaaatacttatatggtacattccaagcactcccatgttttaaggcaaaatttaagttagctgctgctgaaatactattagaagtagttgacaaagaagctagaggataacctattcccatccagctaagtaaaaagactgggatagtcagtaaagctattaacaaaatattatttgattcctgtatttgagtaactaggcctttaaaagtactagaattcaagaatttgatttgaaattcataaattataatccccagaactatcccacaaaaaattgcaaatattgtcgggataaacgcattccaggctctttccttaattctagcggcatgttcaaaatcgactggcttgtgttcctttcctagccaatgaaaaatttgccctacaccatagccaattaacaaggccagcaagacagcattaatttttaaaacactggaagaaaatggtgaatgatcgctggcattattagctaaattattggcataagcacaaaacatgataacgatgacagccgtcatcccggccatggttgaatctttacggtataaacgcgcagtataacgtgccgcaaaataagccgcataaataccaaataagccgaaggttacccgaaccatcccccgactgacaaatgctcccgcataccaaaaacgatctggcaaagtgatatcaaaattaaaaatattgtaaataaaactatcgggcgaaaaaacggcatctctgaacaacttaaaatatgccccaattaccgcgatcggcatcagcataaccaacgttcgctgaaaaattctaaagattgccaatcttcttagtttaagaaagatatttgtgattctgtttaccatggtattttcctttacctatctattctaaatatgattgaataaagttaattaaaacaattattaattatacatctatactagaaagctgattatgatggcttacattaacttaaaaaataatactaaaatttaccaatctggtgacacaaccatctatgccaataagaacattactttttctatcgataaaggagaactagtcattattctcggctcatcaggagctgggaaatctactttgcttaatattttaggcggaatggaaccaaatacaagtggcgatgtaattgtagcgggaaaaaatattgcaaaatataacgctaaagaattaactacctatcggcgcaacgacgttggctttgtttttcaattttataatttgattcccaacttaacagcaaaagaaaacgttgaattagctgctcaaattgtccctgatgcgatgagcgccgatgatgccttgcagtatgttgacctagggcagcgagaaaacaattttcccgctcaactatcaggcggtgagcagcaacgtgtggcaattgcccgagccatcgctaaaaagccagccttacttttgtgcgatgagcccaccggtgcccttgactataaaacaggcaaacgaatcttaaaaattttgcaaaatatgagccggcaaaatggctcgacggtcttgattgtaactcataacgccgctattgccccaattgctgataaggtcatccgtattcacgatggaagtattcaaaaagtccagcataatctacatcccgctgatattagtacaattgaatggtaggtgggcgacatgcaaaaaactattctatggaaagatgcttggcaagcaatcacccattcacttgaccgttacattgccattattctattaattgcactggggacttttgcctttacaggtttaaaaatggctggtcctgatatgcgagcaacaggggcagaattttttgccaaacataacttagctgacgtcactgtcacttcaaactatggcattaattcaactgatcgccttactattcagaatttaccggaagtaaaagaagctacttttggctattttcaagatgttaaaattaaaaatcaacctgatacgctccgcatcttttctcaatcagataatctttcaagttatgaattgattaaaggtcattttcctaagaataaaacagagattgcactgtcatatttattgcagaaaaaatatcgcttggggcaaaacattacttttaataaacctggcattttaaaaaataagacttacaagattgttggcttcgtcaaagctagtgagttcttagataaaaatccaatcggtcaaaccaacattggcagtggccatttaactggaattgcggttgctaatcataacgccttcgccgcaccagtttatcaaattgcccgaatcattttcaaaaataccgccaatttaagtccctttggcatagcttaccgcaaccgtgtttataacgatcaaaccaaattgcaaactgctttaaaccaaaatcgagccgacaaatatgacaaatatcgggccatgtatcaaaagcaatatcgacaagctgcagctaaacaattacttaaacgtggcatcgtagttaacccggcgcaaatcaaagtaccacagaacaagcttaaaattgcttatcctaactacgtaatcaacagccgtgaagaaagtcagggttatgcttcttatcgagcagattctgaacgagttgaagttttggctaatgtctttcctgttttcttgtttgctgtagcggctttggtcagcttaactacaatgatgcgttttgttgaagaagaacggactaatattggtacgctaaaagcactaggctatggtaatggagcaattgccattaagttcttgctctatagcacctcagctgcaattttaggtgttattctgggggctagcttaggttacacctttttgcctaacttaatcatcaaggcctatttagctagctcaaccttaggaactgattaccagctgaattttgcttggggaccactattaatttcattgacgattgcactacttgcaacaaccgtcgtttcaatgattactttagctcaaactctgcgtgaacagccttcagctttacttttacctaaaccacctaaaaatggttcacgtattttactagaatatattccatttttatggaagcacatgagcttttcagctaaggtaacagcccgcaatattttccgttataagagcagaatgctgatgaccatcctaggcgttgctggttgtactggattactagtaatgggatttggtattcgtgattcactacacggaattggcaatattcaatattctgaagtacaaaaaaatgatgtcatcgctttgaaaaaccgccatgttaacacgactgagcgacaaaaattaaacaaaatttttaccagccatgatgttacgcaaactactgctgtacaatatcaacaattgactaaacaccttgatagcactggagcaactgaaaatgtaatgctaattgcgccacaatcaactaaaaactttagcaaatctatcaatttgcaagaacgtcaaagcaagaaaaaacttgttttgtcaaataatggtgtagtcatttcagaaaaattagctactatcttgcacgctcataaaggttcaacaatttccttaaaaaatgaacatgggaaactacttaagttcaaagttagtggaatctgcgaaatgtatctcggtcactatatctttatgagcccagctgaatatgccaaagaaactggcaaaaaatttactactaatgcctatttagtaaccatggccaaacattccccaggaaatatcagccatattagtcaaaaaatgatcaaaacaggcgcaatcgaaacggttgtctcaacttcatcaaatagaaaattgctgagcagtttcactggtagtctaaatgaagtcattctaatcctaattttaatttcagggatgttggccttagtagtcatctataacttaactaatatcaatgtcgctgaaagaattcgcgaattatcgaccatcaaagtgctaggattttacgataatgaaacaacgatgtacatttatcgcgaaacaatcatcttatcggcactaggaattatcgtaggctttggctttggttggtggctacaccactttattatcactagtttgccaccagatgtcgcgatgttcgatccgaatatgtacccgttgaacttcgtcttctctgcgctaattcccgctattatcaccgctattttagcaattgttgtccatcacaagatcaagcgaatcaacatactagatgccttgtcctccattgattaagcgctgttatgctataataatcactatagaaaagggtggaaaaaacatgccaagaaagcactttgaattaaacagtgatgttaataaattaatcgaaaaatatgatgaaattaataatgttgatttcaataagttagttaacaaggccttaagattctaccttgttaatcaaatgaactacaaagatgttcaagacgccctgaataaagctgataacgaagcttctaagtatattgatgaagcaatgcgttccagcatgggtgatattaatcgaaattattagaacataactaatcatggaaaaagccatctgttttgacagcaggtggcttttagtattcattacaagataatttattataaaaacaactaattgataatttctttactcaaaatgcttataccgataatatcgataacctatctttttaccaaaaatcgtctccgaagttttcatccaattagccagcaaaacataaatgcctaaaaagactaaaccgaagattgctaaataaccaaaactaccaacacggcctaagtcgttgaaacgatagccaaataaaatttggtaaacaaagagcaggataatgtaaatctcgtttgaaacaatgatcggcaacaaactccccatcttaacgccatatgtcttattaagcttgtgataactgagccaaattaccagtaagaatgaaatatcagttgaaagaattgcaccatccccattcatgaacatagtcatcggtacttgcaaaattatttttactaagacaccttcaaccatatagatcacagccagtttgttcatgttcaaagctaaaagcagtgttaatgaattcatcaccaaaccagcaaacaaactttgaacaatattttcaaccaaataatacgcacctaaactatcgtgtgagaacaagaccgtataaattggagaagccgcaaaagcaccaagtgcaacaaccggaagcaagacaaataatagtagtctatagttctctaaaagcagctttctaatgctttcttgactatcattagccttatacttaagccctgctaaaagcggcagactagtctcagaaacggctgtcgcaagtgaaataatcaccgtggtaatcttgcttggattagccgagaaaattgtgtacaagtaactaacatagcttttactcatatgactgaagctaatcaggatttgtttaaacaaaagttgatcaactaattgcgtaacagtaatgaacgatcccagcaaaacaaacggaattgaggcataccataagttaagcaaactacgagaaacattattaagtgctctgggctcgctattttcaattaattctcggtaatgtccccactgcttgcgcatatatgcaaaaagatacaggtaactagctatagcaccaacacaggcgccaaacacactgaaataaaccgccgttacgtaatcatgatggaagacttcaataatcaacaaagtagccagcaaaataaacaaaattcgagcaaattgttcccataattgggaaatcccatatggcttcatatcattatttccctgaaaccaacctcgaaccatactcattgatggcagaattactacggctggcactaatactcgaatagaaattgttgcactagccactgaatccactggactatttttggcaatcattggtgccgtcacataaagcaaaataccacacgctattcccatgaccagcataatagcgaagcctaatttggtaatgtacaaactgtctttatatctattttgcgaatttaattgcgatacttcccgggcaataactgaaggaagtcctgccgtcccaattgataaaaacagcgcatacggcgtatatgacgaattgaacagcgcctgtgcgtttaattggttgtggtagcttcccagcataattagccaaggaatcaaataaacaaccccgagaattctagatacaatgctaccaaacgatagccaaaatgaaccggataggatttttttattcaatagaatagcctcaaatctacgttagtttctcattgtgccttcttattatacgtggattttataactttgtgggaaatatgtaccaactagttacccttttttaacaaatttttcggccctaataatacaaatcagttacattatttactatattgttacccagcctttaattttacgttagaccccttgacctaaccttctttaattattatccttaaaatgtttctgttaaaggtcataattagacaaaaataataatgtattaagaatattcatcgggggaattaagttgtcattcaagaaaaagattatcactaaattagcttatgttgctatgctttcaactactggcgttgccgcagctgcaatcgtgcaaccacaagcacatgttcaagcttctaccacttcagttgctgctcgctcactcggaatcgatgttgctagttaccaaagtgctgatctttcagctcacgctaaaagcggtgctaagtttgctgttgttaaagtaagtgaaggtaccagctacagaaatcctaaggctagtgctcaaatcgctagtgcccgcgctaagaatatgatgccaatgggctaccactttgctacattttctgctaatagcgctgctgctaaaaatgaagccaactacgcaatcgcatcagctaaggctgttggtcttggtgctggctcataccttgcatgtgactatgagtcaggtgacggcaacaatatctatggtggtaagaatcctactgctaatgcaattaatgccttcatgagcaaggttaaagctgctggttacaagccacttctttacgctagttcatcagttttaagaaacaacattaacactaactctgttgttaacaaattccctaactcattatgggttgctgcatacgctgtttcaggtcgagtagacaatcctaactttgactacttcccatcaatgaagggtgtttcaatttggcaatttactgacaactggcgtggtcttaacgttgacggtaacattaacgttttacctcttacttcatcaggtagcgctgtttctcaagcacctaagaaggctcgcgtattaaagaagaaggctcatgtatataacaaggctggtcaccgtacaggcaagactattaagaagggcacttctatcactacccatggcaagaagaaaactatcaatggtaagaaatactacaagattgccaagaatcaatacattagatcagctaacctttactaaaaaggcaaaataagtcatcaaaaaatgcaccaggtagaaattacctgatgcattttattttatccaattttttacttggcgaattgttcaccagctaagttacggtagaagttagccttagcttgacggtaatatgggttaacccacaataaaccgatcccgcaggaaataataccaagtagccaccagccgatgaaacttaaatcaaaaataaacaagtccatcttatggccatccatcaacttacggctggcactgatagcttctgtggcagtcggctcatgaccactatctagcatgtcacgcaagatatatggtgtcactgcatatgaataagccttgatcagccctggaataatcagtaaccaagtccacaaaataagaaaaatttcatataaaatataagttaaaaagttactcttaaagtttctggtaaatggactaaagatacctgaaagaacattttccttagtaccactatctctaaaatgcaagatagtataaattacgccccatgtgattaagccaattgcaactgaaactaccaaagtaatcagccatgcaaaaggattaactcttactttatctaggtacatcaattcagcattgttaccgaagcggcggacaataccgtacacgatatcttcgcccttttcaaaaaagttttcgatatcggtcaaaatataaacgattagccagccaacaaatgacagcaaaactgcccagccccagttaccacgtaactggtctctagcttgttcttttaattcttttcttgtagtagccattttctctcctcctcacttttctaatcatgagtattgtcgcctaaaatcagggcagaatcaattaaaagcacatcaaaaaagcctaattccaccaacatcggaactaggctcacacagtgttgaccgccactctgaccacatatagaagataacattttcgctaccggagaaaatgactactaatagcgacggtacatgatagattttagcattcaactacctaaaagacaagcgaaaagacgtgttgaattagcggaatggataccaaaatttacggataaaaaagacgaggtctaaacctcgtcttcttcattactaaaattcaagcatcatcgtcattgcacgattgatcttctttttaatctttttaaactcaccagaagcagtatgattatcctgcaaaatgatcatgttctggccatctttagttgcccgcataaaggtataatacccttcaccagcaccattagcagctttataatgctttaaattataaagtccaccattataatagctaggagcctgacccttgaacagaacttttctactcttgttagtcaaaatcttaccagcaagaatatactgcatggtcttagctaaatctgcgttagacattacgattgaaccagcacccagctcattgtgagcatccttaacggctttagcatggttcactttgacatattcaccctcacgcatttcatagcctggtacccaatgactagccaataacttagccttgtctgaccacaagaactcactatgggttagcttcagtggcttgatatatgtgtcatggaacaattgctcgtatgactttttctcaagcttggacaagattccacaaaggaaaatatagtttactgaagtatagtgccacttacctaatttgctagcatcaaacacagtatattgtgcatcatgcttgatgttcgcttcatcagagataaactcaggcgtacctaattgttgaccagctttcaaatccagccctgatgtcatatcaattaagttgctaatcttgactgaactagcaccatctacatttgggtagaattttgaaagtttatcgctaagcttcaactttcctttctctacctcatgcatcaccattgcagctgtcattgacttttgaactgaattgatcaaatagctagtgtcaggtttattgtccgtcgcataattaagcaaaactttgccatgatttattactaaaactgagcctttaacgcccacatggtcaatagcctggcgcactattccgcttttaaacggtctttattgcttaaatcaactcgtttaacgttatccttgttttgccacttcttggagtagaagtagttagacatatcatagtcataacgcttattaggttccttcatgaatggacgaacagcttgatcaactgcaacccagcctttccagcctaggtgaatagtatcttgcataaagtacttttcattgcctcgtcttgaaagatctgcaatattttcaaagccttgactggttaactggtgttccatcttagcaacagactcttggtacatcttgctagataaaccagtgtacttcatccacttgccattaattggtgggatgataaatagcacattagtgtgttgcttagcaaactgctccaacatcaattggaaatcaccatattctactgaatgtacatagtcaaaatcacgctgactacccttcaagcgtttcaataccttctttggtaaacgtgttctaaagaaggtattatcaatacctaagttgtttgagttagtgtgtatagcagcttgctctgctgcaaccttattcaaagcagctacagaatacttgttaggtaaaaccttagctctcttttgaatcttatttacacgatcacgcaattggaatgagctgaagaaattatcttcgttacgcaacattcgacgacgattttgtaaataaaatttttggaagctagtcaacttcttgccttgagcaatttgcttaaggctattcttgatctcgccctttacatttggcatttccaacagacgtttagctgcataacgatcagttttattattcttggcactaagcaagaaattacatgcttgcaatggtgaataatacaatgcaaaggcattaggatcttgaccccgcttagtaaaccattgtggtgaaatgatcacaacagccttcttgtttctaagctgcttagctgttccttgcatccccaagaactgagccaaagattgactacccggtccacctaataagaatggacggtagtttctatgatacttttccgcaattacactagggtgaagtgggtcgaatcttgacaactcacttgaaccatagaatggcacgtagccatcttcaaaagcttcctgcttcattgtgctgcccttgaagacagttgtgttttgtgaagctgcagcctcgtaaatcgtttgcttagaaaaagttctttcccaaggaataaggaaaacaactaacaaaaggataaaagcgcaaagaactgggccaaagatttgccacagccggcgtttattactcattttctaagctttccacctttgccacaatcttgtttggagtgtcccattcttcacggttaaattctgaaacaggaacatcaatatcaaacttttcttgcaagttcaaaagcatttgtacacttgccattgagtccatcaaaccattgtcaaagatgttttcatccatttggtctgataaatcttcaccagttaagtcatttaaaatatctaatacgccttgttttgtatccataattaatacctctcaaaaaacaactcaatacttattctacttccagccgaaccacagttgacttaggaaccctgagaaaatcaagaaactgaaacatactacattgaaggttaagaaaatggcgaaccatttagtaaacttgttagatggaatttgcttcttatgctttctcttgaatctaagccacatatcgttgatacaaatagctgaagcatggaagataccataaacaatataataccacgttaagccatgccagaaacccatgattaagaacaacaggaagtaagaaacttgtgataatctaattcgattcttaaacattttcttcttcattgcaaagaaagtgaatcgcatgtagatgtaatcacggaaccagaatgataaagtaatgtgccaacggttccaaaaatccttaatgttcttagaaataaatggcttgttaaagttcattggtgtatgaattcccataaagtatgagattgatacagcaaacaatgagtaacctgcaaagtcaaagaacaggtacatactgtggcaatacatgtaagctacaagccaccatgatagcttcaagccgccatttgcattaccaacggctaaagcagcagcactgatctttggtaacaaataagtgccaaagaaccaaccaatcacaaatttgtataaaaagccttggaataagtatctaacagcatactgcatatctgtaatgtatgcatcacgcgtaggtaccttatcataatcttttttaaatctgcggtaacgatcaataggacctgacgaaatagttgggaagaaaagcaagaatcttgcgtaagtaacaggatctactttcttaattgccccatcacgcatttccataataacttgtactgtcttaaaggttacgtatgagattcccaagaaaccaatgacaaagccaattgagttatcaggaaaagcggtcaaatatttaactgcggctaatggaataattgccaaaatcacagccaaactaaagatccaagtcttatttttaccgtggtgacgataatactgataagcaaaggttaaggcaaattcgtaaaccaaccagattaataggttaaccccttgctcccagtgatcaccatcaaaaatcaagaacaagaaaacaattgaaaaaattgcttcatatgtcttgagtcgatgaccgtaatatagcccaatgataattggaattaaagcgatcatcaaatagatgaaatattgcggattagaataaggctgtaagttaatgaaattaaaattcactacttattaacctccttaattaccgccttaatatctaccttaccattttgtgaaataggtaatgcatcttggtagatgtaacgctgtggaatcatgtaaggcattatattcttagctaagtcttcacgaatcatcttagttaaagcagcttcagaatactgacgacgaacgccttcttttaattcgatttcggcaacgatctgcttaacagtgtggtccttattgtacttaggagcagcaacgccataacggacaagcttgttcttagttaagtagaaattgatttcttcaagttcgattctgtaaccattgaacttgatttggaagtcaattcgaccgcgataaaatagcatatcgccatcaaagaaaccagcatccccactccggtagctacgatactcagcaccatcttcatggaaaaaggcagcttcggtcttttcaggattgttcatatatcctttagaaacactaggaccactaatgataatttcaccttcgccaggcttatcacccttagaagtatcaattgtaatcttagtgtcttcttttaccttaccgattggcaaacggtcatactttttaagaacttcatcagtaatttcaacttgagtaacagcaactgttgtttcagttggaccataggtgttgaaaatatgactatctgggaacttcttcttaagcatctcagcttcactgtgtggcaattcttcaccacagaacaagaaatgacttaagtctggatggtgttctgcatcaaaagtcttgtccaagaagcacatctgtgcaaatgacggagttgatacccaaacattgaactgcatctttggcaaagtttggaataatttaccaaagttttgagtaacatcatgaggcaaaactaccaacttaccagcagaaacaagtgctggataaagactcattactgacaaatcaaatgagtaaggtgcttgtgccaagaaacttggatgttctggcaaattaaagtctgacaactcccagttaacgaaactaagcaaattgtcgtgactaatttgtacacccttaggtttaccagttgtacctgaagtaaagataatgtagtagttctcatcaccttcaacgaagttcttctcgtcaacttcaaaattgtcgtcttcaacttcgctagccttaagaaccttaacatcagttaaatcaacttctggtaacggatcaatttccaaaactagtggtgacttagaaacgtcttgaatcatcgttaaacgttctgcgttagaatagctagcaattggaatataagcgtgacctgacttaacacaaccaagaaaactagcaatcatttcaaaagtttgtccgccccaaatcataattggagcatgctctggaatatctaagctagcaattttatgtgcccacgcatttgaacgctttttaaggtcaccatatgtattagtttcaccgagatagtcgtaaacaacacgatctggttcgtttgcggcgatctcatcaattttcttaataacatcttgaatcatgtgatagcacctaccttaaaattcattataaatgaagtgaacagatgttagtccactatattcatataaatagataagagccatcaggattccgaaataaacaattgttttcaaaacaaacataccaatacgtctgcctcgagaatcaaccttcgtctttttattcattttttctcctttaggtaatcttacttttgcctttgccctatattactacaaatagtggcaacaaacgcactaacggcttatattttaacaaatttaaactttttcttaaatcttcagttatttgtttcaaattgcgaatgcgttttctttactgttgtctcttgcaatcccgataagcaaaaaataatggaataaagataactattgccacaaaaatcaaagcaaagatcattaagcgccatacattctgtggtttagtccacattttactctttgccgtcgccaacaaaaatgccgcaaataaagcaataacaattacttcaaccaggcaaaaaattaaatgagtattttgccagagatataagtaggttgttgccggaaataaacaaaaccaccctgaaaagcgtaaaagaaagatttcttttttacgataatctactttcattatagtttcctttcctcattaactgccaaataacgcattaatattcaccgacaaaatccggtccataactacaatttctggtctggcgtagatcttagagcctgattcaaacacacatagtagttgtcccttataagcggtaatttgctctaaatatggcggcatggtaattaccagttctgcattcttttcgtctaaagcatttaaagctgaagttggaaaaacgtagagcttggaatcaccactaccataagattggctcaaaaaaattttattttggtaaattgcaattccttgaatttgcttatccattgaagtttcgccagttggatcggaccattgcagcgttccggtaacagatttaacttcattattagtaattgagccacgatttttaccactacgcgctatagtgtaagccgcaacttttcctcgaccatacatgttaaaaaagccaacaaacaattgaccatcataatatgtaacggtcgatgctttttcaactgcaggaatggcaatttgatatttatacttaattggtatttggctgccctctttataggcccttaattctgccattgaaaatgctgctagcgctgaagatttgcccattgagccagttatccagatatttttggctactggatcataagcaatcccacctaggtgtggccgaccaggtatttgaatcgttttaagatatttgcctgtcttcttatctaagacataaacaaccgaagcatgctcatgttcaccatcataagcagttagcaaaatatacttacctgcaaccgtaatcccctgtggtgtcattgcagttgctgtattgacctttttagttttaaaatcataacttttagtagcaactaatcccggcaaaacaaagtcttttccatcccacgtccgcggtggtacataattggcaactttattaataaaaggatatttttcacgcaatgctttttggtaattggcaaaattatgccaagcaggactagtgcttgtcccatccttagcaattttttcttttggccgttgacggatcatctcctgcttctgccaccattggtaaccgaaatagcctcctgcaccaatccctgcaagcaaaagcagtactagcaggaagcgcaaaattcttttaccaatttttttcaaaaaattactcccttctgtttaggaattgtccctattatgcaattcattataacgaaaaaacaattactttttgtttttaactccttgctataagctttatttactaaaaagataaatttttttgcaaaaaagtgctttcgtcacacttttttcacaaattaaggttatactagtaaatgtagtgaggaagaataatcctctactacaactcaacttttttgtttttcattcatactcctccaagtaaataatgaaaataaaaagaattgacttactccaattagtcaatttcatatctatccctttcggctcacgtgcgttgcgtgagcttttcttataccttaacttattctcaagcaaatctttaccttttcataataaattgaacacttttacttcacatttacccagtattatataaaccgtagcaagatggtagaaacttgctacaatactcccacttttttatttcattcttactcctccaaagtagatgaaactaataaggtccgcaaaaacttgcgggccttttcctttttcagcacttttttctgtataattaaggtagaaatgaggtgccgctatgttttcaccatcaatcaaacatttaatagaagaaaaatctggttcatttttaatccctgctagccgaattgcctttgtccaagcagacaatcctctttatcatgcctttttgattttgactaaggttaaatattcaaaaattccagttttagataaagaaaaacgagtcgttggcctgcttagtttggaaatgattacggacaagatgctgacgactgatgagatctccactgcccctttagataaattaaaggtcgaagatgtaatgcaaactaagtttgataaaataaacttcgttgaaaccaccctagaaacgcaactgcatctgttaatcaataatgctttcttgcccgttgttgatgatcgcggcgtgtttcagggactacttactagacgcgaatggattaaggcatttaactatgtagttcacacttatgacaaacactacgaaacaaaacgaataaaataacctccaagcagcctttaaggctgctttttttaactccaacatttattgagcaaaaatgtgtccagaccaataaagaatgttagaattaagcggtagacagatatgtttgtattttggggagggcaattatgaaaaatttaaaacgtcaatggaagtttattgtcgttttgattgctggtgcagttggattaattagccaatttgcattgcattcaaagagcctattctcaatcgggaatcttcaatttccagttcatgccatcattattgatatcattggtatcttgatggcaatttctttactattggaaattttccacgattggaagacaggccgttacggcgtagacatcctggctgttatcgctgttgtttctaccatattgattggtgatgtatgggctgaatggatgattttggtaatgatgaccggtggtgaaacgctggaagattacgcaactggtcaagccaacaaggaattacgtgccttgcttgataaaacgccacgtatcgccaacaagttagttgacgggaagatcaccgaagttaaggttgatgacctgcaggtcggtgatactgttttgatcaagccaggtcaacaagttcctgtcgatggtcaaatcgttaagggcacttcaagcttcgaccaatcttcattaactggtgaatcagttcctgtgaccaagaaccctggcgacgaattaatgtccggttcagtgaacggtgatgtagcggtagagatgaaggtaactaaggctgctaaggactcagaatatcagtctattgttgcgttagttaagtcttcacaagctcaacctgctaagttcgttaagatggctgaccgttacgccattccgtttaccgttatatctttaattattggtggtgtcgcttgggctgtgtctggggatgcaactcgctttgcggaagttatggttgttgcttctccatgtccactgttgatcgctgctcctgttgctttggtatcagggatgagttcaatgtcagctcaccatattattgttaagtctggtccaaccctagagaagttggctcgcgctaagacctttgcttttgataagactggtactttgactgaaaaccaattgatcgttgaccaagtcgttactgatgacaaatcatttgatcaaaaagaattgcaaagcttagctgccagtgttgaacaacagtcaagtcacgttatcgctagttctctagttaaggctactgacaaggatttaattcatcccgtaactaaccttaaggaaactaccgctcaaggtgttgaaggtgatgttgatggcaaacacgttaaagttggtaagttatcctttgttgcgccaggtcatgaaaaattaaacgtcacttcaactgctgtttacgtttcagttgacggtaagtttgctggttacatcactttgaaagataagatgcgtccagagagtcctaagactattgaacgtcttcgtcgtcaaggtgcagaagatatcatgatgcttaccggtgaccacaagcaagtcgcagaaaaggttgccaaagaagccggcattactgatgtccgctcagaacttttgccatcacaaaagattcaagctattaaagatgtgccaaagcacctacgtcctgtcgttataactggtgatggtgttaacgatgcacctagtctgaccgctgctgatgttggtattgctatgggtgctaagggtgctactgctgccagtgaaagtgccgatgctgttatcatggttaacgatatttctaaagttaacgatgcagtcgctatttctaaacacacaatgaaggttgctaatatcgatgttttaactgcaattggtgtcgttattatcattgaattgattgccttcactggtgttatcccagccttctggggcgctattttgcaagaagtagtcgacatgattacgatcagcttaggtttacttgctaagactaagccaagtgataagcaatttggtttggaagaaaaatagattagatgtgaagaagctccagaatcgatttggttctggagccttttttcatacataattatgcgtagcactgcaccagttcaatttgcatctaagttaaaaaactattaagattaaactcaactaaataatttttagtggttgggtttttatcacaataaaaactttcaagattcgcttctttgggtcaggaagcacttgaaagttttttgtttttttacagaaggggaaaatatgcattttttaggacaacttatcttaatcctcttaactacagttttgctggggcaattattcgcccgcttcaatatgcctgcagttattggacaactattatcaggaattttactgggaccagctatcttaaattgggttaagccaaatgatatcatcagtctattctccgagttcggggttattctgctgatgttcttagctgggcttgagagcgatctagatttattaaaaaaatacttcaagctaagctttactgtcgccacagtcggcgttatcctacccgttgttttcatgggcttagccagttacttctttggcatgcgccctcttgaagcactctttatcgggattgtctttgcagcaactagcgtttctatctccgttgtggtgctgcaagaagcacaccaactgcacacccgtgccggcacagccattttaggtgctgccgtagttgacgatatcttagccgtggttgttctgagtctattcactacattcagtcatgaaggtggcaagagcggcttaactaataactttttgcttaatatcttgattgaagtagtttacttcgtagttgtttggctgatttttaaatttgttgcgccatactttatgaaagcttctgaaaaaatcgacgttgactattccgtcgttatcggttcattggttttagccttaaccatggcttgggccgctgattttgttggtctttcagctgttgttggtgcatttttcggtggtttagcaattcgtcaaacaccacaatacaaagaagttcactcctctgtttccgcaatcggctactctgtcttcatccccgtcttcttcgctgatatcggtctttcaatgacttttgccagctttttcaaggatatctggttcattatcgttatgaccgttttagctattttatcaaaattctgggccggaaaatactccagcgaaatctttggcttcaataagaatgaaggcaatatcgtcggtgctggaatggtatcacgtggtgaagttgcactgattgtagcgcaaatcggaattaaccaccatctcttccctgaggatatttattcaagtctgatcctagtaattatcgttacaacagttatttcaccatttattttgaattactttattaaaaagagtcaaaatagtacggaatttatgtagaaaaagtctagcattcgctagattttttaatagtttaattttacaagtggcttatcataaacgcaattgtgtctacatggtaaaatcaatagtgagaggtgagaaatatgttacaaactccaaacaatattagagctgttaccgctcgtgacctgcgcaataattttaagaaaattgctgatgatattaatgactatgatactaccgttatagtagctcgtcccaaagataaaaatgttgtgattatttctcaaaaagaatatgattcatggcaagaaacttcatatcttctaggaactaaagctaaccgcgatgcattagctgaagctaaacaatcatttgaaaaccaagatcaacgaaataaagttttaaccccagaagaattcgaggctttaactaaagatgacgaagcttaaccttaattttaactacaatgcctggaatgaatatcttgaatggaaaaaagaggataagaagacttcccaaaagattgataattttattaaagaatgccaacgccatccttttactggaaaagggaaacctgagccattaaaagcgaatttaagtggtgcatggtctcgacaaagtaatcataaagatcgcatggtttattcagttaccacaacagaattacaaatatggcagttaaaataccattattccaaatgaaaaagctctttcgagcttttttgtttaacccaattttcctaaatcgattacttggtcatacttctgcaactcatttgattcatagtggtgaattacttcaataaaggtaaggtttgagtttaacaagtaattatgaatttgatctgatgtcttcttatcaagggatgcattaatttcatctagtagcaaaatcgatctatcggccaaaattgcccgtgctagttctattctagctagctgtcccccagacaattgatccgcattatcacccaaggaatagtcccagcccttttcagcaataatttgatccaaacctaatttttggcacacctcgctcaccttttcccgggaaatatttgcacctaaagttaaattaaaccacaaggtatcggcaaaaattactggggactggctagcataagcgaataaatctgtaaacgagcctggcttttgctttttgtcgttaagcaatatttccttggcatgaccatgctttccggttaataggaattgtaataacgttgatttacctacaccagatggtccaataactgcaactttttgaccttttacaactgcaaagttaatttgattagctaattccttgccttttctagtaagatccagatcttctatttgcaaatttgcaaaattataattggtctctttcttttcaaccttgcccttggcaatatatttttctgccttagcgacaattttcttagttgttgataatttgtttcgatcttctaaaatagtcaaaattggattaagaaatgaatttgacagttgaacgattgcaaataaggcacctaaagtagtttgacccttaaccaccatgtaaattcccactaagaatggggttaagaacgtaaataaactagcaatcaagttaatccaagaattagtatctagattgagtaagttcattttacgcaaagcatcttctaattgattgatcaaaacttgatttttcttaaccgcattatcgcgcttgttgtataaatttaatgttgtgctaccagccagaaagtttttaatatgactaacatatttatcattagcagttgtccaattttctgctgcagtttgaatcttcttttgaaataaattagaaaccagcatcggcaaacatgaaccgattaaaaataataatgtaactaaccaattaacacataaagcataccctagcgcaaaaacaatcatataggcctgcatcattatttcaatttcagcatcaaaacgattagtttccagcagcttaaaatctgtagtcaaaaagcctaagctagcagtattttcttcgctagtctgacccagcatcccctttaaaatgccagctcgcagcgtcgtattagtctcttgaatagcacttgtttttaaccgattgaaaatcagcgaagcaataaaagtcgcaataaacgccccaataacaataactagaaattgtgctaaatcgccaaaccttctttgcgtaccaacattggtcaatgtctgtaccatatatgcaaaaatgatttgttgtgtactagcaatcaagcctaaaatagttaacataatgaattttgcatgtgaagaatatttgtaaatcattttttgtcctcctgtattttacttgaggctagtatcgcaggataatgacgaaaaatgttagaaatttacagatctgcaaatcgaggtaaaacattatgttcaaatatggttcaatttacaaacaattgcgcaaagatcaagaaatcactcaaactgaagcctgcaagggtatttgttcaatctctaagttatcacgctgggaaaataatcaggtagaagttgagtttagcaccgccattgcattactcaggcgcatcaacattacgcttgacgaattcacgcattacgctgcaatgaaaacagaatttacattgccagacgacattataacggccattaaagacaatgatacaaaggtactcgaaaaatttgttcaggagcagctaaatcattatcacgccaacaaaaatattctcgaactcaaaaacatcattcttgtctgcaatcaattatttctcatgactggtaaaaactatctaacacctgcagacattaatcgaatcggttcatacctgcttcacaacaccgtttggtctaaatacaatatcttgctttttgctaactcaccgtttttgctaaattctaaaatcggctatcaaattgctctgcgaattattcacaattttcaccctacagaaagtttaaacgaaaatactactattttcatgggcggtttatctgatacagttattgccttagttttcaaaaagaagctagattacgctcaaaaaattcttaatgaattaaaaaagataggacttcccttctatctcatgttctttagttcaacattgacccttttacaaaaaattatcgactactgccacactctcaacgcacagcctgtattggcaatgattgatgccatagttcagctaaattgcatggaagttgctaaaaaatggcttgagatttttaaagacgtacaacaaatctggccagaaaaagaaaattaaaaaccgtaaaagtaatttactttcacggcttttgacatggtattcattatgcaagcttacaaatttttagcttttaattaatccttaacaacgtctttggtgttcaaccattgactcttgttgatcttaacgatcttcttgccagcagctttcttaacatccttagcggtgtaagttgaacccattgaaaccttttggctagtcttgtgaccttgtgcgtccaaaacattaactttttggttcttagtgtcctttacagcaacaaagatcttgtcaccctttttaattgcaggatcagttggcatagtttcggcaacacctaactttggagcagtaaaactagctgcttgactaactgaagcaccaacacccattaaactcattgaagcaactgcgattgaaacaactttaactaaattctttgaaactaacataatgaatacctctaatttctatatcacttaatttgttggaactttttgttccctcattccttacgtctttattgtataacatatgttattaattacaaggggtttatcgaattttttaaaaataattcagtcgtctcaaagtattgctataataacgattgcggggatttttgtccaaaagcattaaaaaagtgtctgagaaaccgttctttcccaaacacttttttaagcagctgctacttcgtttgaattttgagtcacttttctagtttttaaactgacaaaaatcgctacaattagtgttattacctggattactaataatgtaaccaaagcaacagtaacattgaatgaaccagaaattgtggttaatactgttgtcataattggagcaacagccattaagattgtatttaataagccaacagttgaagccaagattttatgatcaactgatgttactagccattgctccattttaactgaagcaactcctgcaatagctgccaagaaaaacattgttatcataattacgtaagtatttcctaggaaaatgcttgttgtagtaacaatacttaaactggcagaaataattactaaactaaaaactgttaattttttgaataattgtggtccaaacattgaacccaatgcaaagcctgcgccaataaccacaccaaacaaagcaatagtaaagctataagtgccgattagcatagttgaacgatgagctgcaagtacaattgttgtcaatggagtaattgtatctaaagctccatttaataatgcgattactaataccacagtcaataatcctgattgtttcttcacttgggtcaatgaagttttcattgtttggaaaaagttttgatcattaacttcctttttttcaagtggcttctgatccttctgatgttttaagccaacactggcaaataacaaacctgctaacaagaaagtacctgcattaacaaaggctaaagttgagtatgacattactagcaaaagtgctgaaccaatgaattgagcacccatactaataatttgatttacgccgccattaaagcctactgcattcccgtattcttttttaccaacaatatcaacaattaatggtgcaaccaagccacctgaatatgaaccaatagtatctgataagaaattcacaacaacgatgattaaaaccaaattccactgtgacattttagtgataaacaataatcctactaaaccatataagataaatcggacaaatgctgctaaaaagatattgcgaaactttttcttagtcttatcagcaaggtaaccaccaaagatctcgaataattttggaactgattcagaaattgcaattaatgaaagtgctaatgagtagttttgtaatttgctagcataagtcatgaaagccaagtagaaaagaatatcgcctgcgcctgaaagaaaactagctactgaaaatcttctaaagtctgcgtttttaagaaatacgttcataaatcttaccccctttttctttgtttcgtttgttgttgaaattataataaagtgaaaaagaaattaattttaaaaatggcgtattcgacattcggaggataaacctatgacaattggtgaattactcaaagaaaaaagactagcagaaaacaaaactcaaaaagcatgggttggtcatattatcagtacttcttattatgctaaagttgaaaagaatattcatagaattacagcagaggatttattagccattcttaaacataatgatctttcaattactgactttttcgaagaattagcagacaaaaaggatgaactaaaagcacaagtaaactcgctaaataaaacagtaattgatgctgtttatcattctgatgtttccaaagttaatgaagtcattcaaattattaaaaaaatggatctaccgactaagcaaaaacaagaacttatcttaatcaataaggggtttatcgaaactatcaaaaatgatctaagtgacaattatcagccagataaaaacatcgttcaacaactaaaagacaaaatttttagtattcctaattttaatagattcaaacttgaactctatactaatttcatgcaattttatgattatacaactaatattatgatcaccaaacaagtgatccataaaatagatcagtttaagagcgataaagagttattagcaatcgctggtattctattcaatctcctttcacaattagtcgaagaacatcattatcaagaaactgcaccatttatagcagctagtgagcatttaccctttttaccagacttatactttcctcaaaccggaatctcattgctaaaataccttattagttatcattttaataaaaaaacagcagacttagctaaagctgagatgattgcacaaacttatcaaattactggtctagaagactttggtaaaggtgcacaagaaattattaatgaagttaaagaggactagctttaagctaatcctcttgtttcaatctctaaataaaacctaacgcgttatagcacatgtgcaccaaaattgaatagcgcaaatctttggttgacatatagacccaagctaaaaccatgcctaagacccaatatactaagatatacttacttaatgccggatcatgcatatagccaaataaaaatccgcttgcaacaatacctagccacttatttctagtatttttcttagtgaaaaagatattgaaaaacatccctctaaagatatgttcctcacaaaatggcgcgatgaaaactactaggatcctaaataaacctgcattgtattccgctattttattcaagctttcctggttctttgaaacgccgccaccaactagattaagcatcacaatcgaacctactacaatcagtacaaaaccgatcatcgctattccgattctgcgccagtcccagtgtggtgtttcatcaaagccccaatcattttcttcttttaattgcctgcgataaatataggaaattgcaaacaaaactattaccgtagcaagcgccgtaacgaagacgcgatattgcgccaaatcaaatcgctgaggtctaaagtaaagtacttctaattcagaataaattaccaaagccaacacagcccctgcaatatttcccaggtaatgtccaaatctcttcatttttcattcacaccttgattctttcaactagtaatcattgtttctattataatgtaaataagaaaaaatacctaaggaggagtatctatctatgcttaatcagatcatcgcttttttggggagacgcggtgagttcttctacatttcagtctttatgttactgatattttttgcctttttaatctcttggcttatcgaaccaagacgtttgattaatggcgttttgtttactatctttatagtctcaatgctctcttggatcaccgttatggtgcacaaaagtacgagtcacggcttgcaacgtgcctatgacctactagttctagctgcattatttggcattgtcttattattaattttcgcctggatttttctattctggaatgcctatttcgtttggaaatatgaaagccatactttgcctaacttgcttactttaattaccggatttttagcattaattattagtattatcgtgctcttaggaccaggtaagtacttgccacgttggcttagtctcgcattagcttcaattcccgcgattgcaatttatttgggattggtgctttacaactttttggtaaacttgcttctatatcaaatttatcctcgtacctaccaccaagactatttaatcgttctagggtctgggctaatcaatggcgaccaagtatcaaaactgcttgcggctagaattaatcgggcaattcaatactctaaccgccagtatcaaaagggccgcaagcgccctatcctgatcatgtcaggtggtcaaggcgctgacgaaaaaatctctgaagcactcgctatgtctcgttttgcacaacggcgtggcgttagtgttgaccgtatcttattagaagatcaatcgaaaaacacatacgaaaacatgctcttttctaagcgtattgccacaaaagattttggtaattcccacttcagggcacgcttctttagcaataattaccatatttttagagctgctctcttggctaaggaagttggtttaaaagccaatggtgtcggtgcttacaccagattctactacttgcctaacgcaattatccgcgaatttgccggtgtgtttgtcatgcataaacgccgtcatttcgttatcatgggattaatcgttttattctttatcctgcaagctatcttagtcatgacaggattagaaagatttactgtaatttagaaaagagggatgcaatgcttcaactaaagcatatttttaagtcatataaggtgggggacaacatcacccacgctttagacgacgttacaatctcgttccgtgaccaggaattcgtcgctatcttaggtcctagtggttctggaaaaactaccatgttaaacgtaattggcggacttgaccgttacgaccaaggtgacttgatcatcaacggcaaatctaccaagaattttaaagagaccgactgggatgcttaccgcaacaataccgttggttttgtttttcaaaattataatctaatcccccacttgtcgatcatcgccaatgtggaactagggatgaatttgtctggtgtgcctaaaaaacagcgccatgaaaaagcaattgcggcgttaacagaagtgggattgaaagaccatctaaataaacgtcctaaccagttgtctggcggtcagatgcaacgagtagcgattgctcgagcaattgccaacgaccctgatattctactttgtgatgaaccaactggtgcacttgatactgagacttctgtccaaattatgaagttgatcaaaaaactatctaaagatcgactcgttattatggtgacccacaatcctgaattagctaaagaatacgccacaagaatcgttaatttccaagacggtaagattcgtcatgattctgatccttttagccctaataaggaagaagacaaatttaacctcaagcgtaccaagatgtcttactggaacgccatcaagttgagtttcaccaatattatgacaaaaaaaggtcgaactctgctaactgcttttgcttcaagcatcgggattatctcaattgccgtagttttagctatctctaatggttttcaaaagcaaatcaataccacaatgagcaaagctttagcaaaatatccgatttctatttcacagaccgcaactgacattacttcagctaatgcacgtaaagaatcggataaaaatgtcaaaaaccgcggctatgtaacggcagaacaagaccaaagcgaacaggcccaacacgttaataaaattagcacaaagtatgttaactacatcaagaagatcaatcctaattatgccaataacgtgtcttaccaacgcggcgtaagcttgaatttattagctaaaaacaagggaaaaattgaacgcgtgcaattttcaaatacggatcctgatcagactaattctgttctagctgctagatcccaagcgatgagttcaatgggactgggttcaagtgtctttcccactactttaaataaagagaaagactcatttttgaagcaaaactatcaattgctctcaggcacttggcctactaaggcaaccgacttggttttagttactgacaataaaaatactgttaacatcaatgccttaaaaaatcttggtttcgatttaaagaataaggaacacgtcaaattcggccaattagtaaataagcaatttcgtgtagttgctaacaatgattactatcagcaattgccaactggcatgtttattcctaaaaaggtaaataacgccatgtataacggtgctcaaaccaagctaaagattgctggtgtcattcgtcctaaaaacgaagattcaatggccttgttatcaactggaattgcttatagcgatcaactttcacaacgcgtgattaatgaaaataaaaactctgcaattgtaaaggcacaaaagaagagtaaccatagcgtattaactaaccaaaaactaaatgccaatgaaaagaaagctacaatgcagactcttggcggtaccagcatccctactggtatcatgatttatcccaacaattttgatgataaagataaagtacttgattatcttgacaaatggaacaaggggaagaaaaaatcagacaagattctctatactgacatgtcaaacgctgttaccacaatgactggcggcctcttaagcgggataacgaccatccttgtcgcatttgctggtatttcattaatcacatctatgattatgattggtattttaacttatacctcagtacttgagcgaactaaagaaatcggggtactcaaggcattaggtgcccgtaaaaaagacattactcgtgtctttgatgccgaaaccttcatcctaggtgttttctctggtgtattaggcattctgattgcttacctactaacattcccaattaacagtatcatttacaagattactgatctggcaaatgtagcccaactagatcctactgctgctattgttttgatcattatttcaactatcctcaccctcttaggtggtcatattccagcacgaatggctgcaaagaaagatgctgcaattgcattgcggagtgaatgaatttaataaagaatttgttacgttgttcacaataacctaaatttttagcaaaatatgtggtatcttagctttagcaaaaacaagtaagaaaggaacttttttcaccatgactgttaaaaaattagaaaataacagcgatgttaatgtagtggcagaagaaagcaaagttttaactgatttattgaatgaatcaactaagcaagtaatcggtcaagcagctttcgataagatccaaaacttaattaaaatctctgccgccaaagattatcaagaacttgaaaagcaaattgctagtcttaacaatcgcgaaatgattgttgttgcacgttattttgctactctcccactcttgatcaacatttcagaggatgtagaactagcaagtaaagttaatgtgcttaacaatactcatcaagattatctaggtaaattgagtgacacaattgacattgtagcccaaaagaaaaatgccgaagaaatccttgaacatgtaaatgtagtacccgttttaactgcccatcctactcaggtacaaagaaaaaccattttggaattaaccgatcaaattcatcaacttttgcgcaattatcgtgatgtgaagaatggcacaattgatcgcgatgaatggactgaacaaatgcgggcttgcattgaaattttgatgcaaactgacattattcgtggtcacaaattaaaggtagctaatgaaattaccaatgttttggcttactaccctaaggctttaatccctgcaatcaccaaatttactagtcgttacaaggaattagctaaaaaacacgggctaaacgctagtcatgctacgccaattaccatgggaatgtggatcggcggcgaccgtgacggtaacccttatgtaacggctgatacgctagaactaagcgctactttgcaaagccaagtaatctttgaatattacattaagcaaatcaataagctttatagagccatttccatgtctacttcttatatggagccatctgacgatgtaatgcacctatctgagctttctaatgatgattcaccattcagaactaacgagccatatagacgggcattctactatattcaaagccgtttagtgcacactgaacaaaaattactgaatattactaacaagaacactttcttaaagaaacgtgacctccaaaatcttgataaaatcccttgttatcaaaatgctcaagaatttaaagccgacttagaaatcatcaaaaattcacttgaagaagaccatgatcacgccgtagtagacagctactttactcaaattcttgaggctatcaacatcttcggcttccatctagctacaattgatatgcgtcaagattctagcgttaacgaggcctgtgtcgctgagctacttaagagtgctggaatttgtgacaattatagcgatttaagcgaagacaaaaagatcaagcttttactcaacgaattgaacaatgatccacgtaacttacacgccaataacaaacccaagtctgagttactacaaaaagaattaaagatctacaagactgctcgtcaattgaaagaccgtttgggtgaagacgtcatcaagcaacatattatttctcacactgagagtgtttcagacatgctagaacaagcaatcatgttaaaggaatacgatttacttgataatcaaaaagcccgaattcaagtggtaccactatttgaaacggttgaagacttgaataatgcccgggaaataattaaggaattcttaagctttgatatcgtcaagaagtggcttgtttctcaaaataattatcaagaagttatgttaggctactcagattccaataaggacggtggctacttagcttcatgctggaacctttataaagctcaaaaggatctaactaagattggtgaagaaatgggtatcaagattacctttatgcatggccgtggcggtaccgttggtcgtggtggtagtccatcatacgaagcaattacagcacagccattcaagtcaattaacgatcggatgcggatgaccgagcaaggtgaaattatccaaaacaagtatggtaataaagacaccgcctactacaacctagaaatgttagcttcagcaacaatcgatcgaatggcttctaagcaaattgttagcgaagatcatgtcgcagatttccgttcttcaatggatcaaatcgtagctaaaagcaacgaagtttaccggaaactagtatttgagaatcctaacttccttaagtacttcttccaagcaactccaatcaaagaaatctctggtcttaacgtaggttcacgtccagcttcaagaaagaaactcactgacttttctggcttaagagccatcccttgggttttctcttggtcacaaagccgtgtaatgttccctggttggtatggcgtaggttctggtttcaagtcatttatcgatgctgatccagccaacttgaaggaattacaaaatatgtaccaaggttggccattcttccactccctgctttccaatgttgatatggttttatctaaatcaaatatgagaattgccaagcagtatgcggatctttgcgaagatgaacaagttaaatcagtctttgatatcatcaatcaagaatgggaactaactaagaaagtcatcctacaaattgaaggtcatgatgaattaatcgaagatgcacctactcttaagaagagtctggaatacagaatgccttacttcaacattttgaactacatccaattagaaatgatcaagcgtgatcgtgaagatgtgattcaaggtgtttaccaaagtattattccaattactatcaacggtgtggcttccggtttacgtaattcaggataaaaaacacataaaattcagctaaaaaaggctcctcattgcctgttttatcaagcatttgaggagcttttttttaatttattaaactttttagttacgcctttttcataactaagttaagtggcgttacaattactggaacgacaatggctgtaaaaattgcttctactaaaccgttcatgcccagtgccataattaaaattaaaatcaatggcgtacctgaactataatttcctaggtaatgagttaagcttgctggatcatgcatgaagaaaatactcgtcagcaaaataaccatcacggtattagttaacgaagtgactgctccacttatgatataacccaatttcgcatatttagtcttactcatacccttcgcaataattcccgggaaatagccagccaaaatacttggtaccaatgaaattaccggattttggaacaacattaagctgaccatatcgccaggttgagtatatgcaacaatcaatctggtaataccccagaataagccaaagcctagacccgccttttgtcccattaacgtgccatagacggcaattgtcattggaatagtagttacagctggcaaagccgggataattcttacatagccaacatttggcacaaaagtctgtacaatcaataaagcagcaaagacagcagtaattgctaatcttttagtttcttctcttctcatatatttctccaacttaattctttagactcaattaaaccataattaagattttttctcagcaaaaaagtttattatacaatatctaggtatattttatctaatatgacaagatattgtatttttttattatttttttacttaattatgcattatccttactctctctaatgcataatcgtgttctataccaattaagaatccctttatatcaatactttatgttgtatgtcaattttgacatagccactaaatattgttaatctcgttttgtgttaaaaatcatttgatggagagaggatcaattttatgaataaaaaagtcaaaaaattactatctattggtgtgcttgcattgagtttaggtgcaattttaaccgcctgctctggtaaaaaacagggtgcaagcaataataaatcaagcgatgccaagcactctattgcattaattactggcggtaatggtgtaaatgataactcttttaaccaatctgcttgggaaggatttcaaagttatggcaaagagcacaacttgagccgcggtcgaaacggttatcaatattttcaatcaagtagtgctgctgatttcactcctaattttgatcaggcagctaaagctggttatcaaactatctttggcgttggttacagtttaaaagatgccgtagcttctgccgccaaacgctatcctaaaaagaattttgccattattgacgatgtaatcaagggacaaaagaatgttgtctcagctaatttcaagagcgaacaagcttcctacttggctggtgtcgtagctgctaaagaaaccaaaaccaacacggttggcttcatcggcggtgctcatggcgatattgtcgacctttttgatgccggatttactcaaggtgttaaagatcaagccaaaaaaatgcacaaaaaagttactatcttaaaccaatatattggcaactttactagttcagacaaggccaaatcaattgctcaatcaatgtacaccaaaaaagccgacatcatcttccatgctgctggtggtgctggtgatggtcttttccaagaagctaaagccattaatcaaactagaccagctaaagataaagtgtgggtaatcggagttgatgtcgatcaatctcatctcggtaactacactgctaaaggtgggcaaaaatctaattttgttttgacatcagtaataactggagtaaatgttgctgtcaaagatatcgccaatagagcttataataataaattccctggtggcaagaatttggtttatggacttaaaaacaatggtgtttctattgaacgaggacagatttcagcttcaacttggaaagatgcccaaattgctagagctaatatcctaaaaggcaaaattaaggttgccattcatcctaacaataaataaaagcatactagtatagtttgctttttataattacaatcaattattttttgcctgatcaatatttttgttgacaaaataccgaacaattaataaacttatttataaattgttcggtattaatattgtggaggacagaaataatgaacgtaaagttcaagaaaattttatcatttggtgtcgttttagcatcagttggcttgattctaactgcttgttcgggtaaaaagtctggtcaatcagccaacaaagatactaaacatggcattgccctaatcacagatgaaaatggtgttgatgatcattcatttaaccaagctgcatggtcaggatttaaagcatacggcaaggaacatggtttaaaacaaggaaaaggtggttatcaatacttccagtctagcagtgccgcagacttcactcctaactttgatcaagccgctacagccggctaccaaaccattttcggtgttggctatcaattagccgacgcagtcaagcaagcagccaagaagaatcctaaaaagaatttcgttatcattgatagcgttgactctgggattaagaacgtcgcttctgcaacctttgaaagcaatcaagcttcttatcttggcggattggccgcagcttacaccactaaaaccaacaaagtaggtttcattggcggtgctaagtcatctattattgatttattcgaagccggttttaagcaaggtgttgctgacggtgctaaagctcttcacaagaagatttcagttcaaacccaatacatcggtaacttcacttcaaccgataaggctaaatcaatcgctcaatcaatgtatgctaaccgcgctgatattatttaccaagcagccggtaacgcaggtaacggtgttttccaagaaggaaaagattacaaccaagcccgtccagcagctaaaaaggtttgggtaatcggagttgacgttgaccaatctaacctaggtaactacaagtcaaaagatggtaagaaagagaacttcactttaacttccgtcttaaagggcttagatgttgctactaagtcaattgctaatgatgcttacaatggtaaattccctggtggtaagcacttagtttacagcttaaagggtaatggggtttaaatcaccaaaggtaatttaaacgctaaaacttgggcagcagtacaaaaggctcgtcaacaaattattgatggcaagatcaaggttgctactgctccaactaagtaattcagctgcttagtattttgagaactcttcgttttttagcgaagagtttttctatagttaattaaggaagtatttatttacatgaaagaacagagaaataaagtaatcgagatgcgtcatattgtcaaagatttcgatggtttcaaggcaaatgacgatattaaccttacgctctatcaaggtgaaattttggctttgcttggtgaaaatggcgcgggtaaatctaccttaatgagaattttatccggcttgcttgaaccaacaagcggtgaaattctggttaataatcaaaaagtaaatattaaagatccaaccgtcgctaaaaagttaggcattgggatggtacaccagcacttcatgcttatggactcatttaccgttttagaaaatattattctaggacatgaatcaactaaaggaccagttatcgatctgaaaaaggcaagaaaacaggtcctagctcttgcacaaaaatatggctttgctattaatccagatgccaaaatctctagcattactgtcgcccaacagcaaagagttgaaattctaaaggtactttatcgtggtgcagatattttaatttttgatgaaccaactgctgttttaaccccacaagaaatttctgaatttattaaagtactcaaaaatttagctaaagaaggcaaatcaatcattttgatcactcataaattagaagaaatcaaggctgttgcagatcgagttacagttatcagacgtggtcacgatgttggtacttttgctgttgatcaagttagtgatgagcggttagccgaattaatggtggggcggcatgtcaacatgaagctaaccaaaccagcacctaacttgggcaagcaaattctagcaatcaaaaacttacaggtaaaaggaaatcacggtgccttaagcgttaaagacctttccctttcaatccgtggaggcgaaattttagggctagccggaattgacggcaatggacaagatgaactggttgaagcaatcactggtttacgccatgttaagtcggggcaaatcttaattgatagtcaaaatttaaccaaccaaaaagttcgcaaaatcaccgaagctggcgtagcgcatattcctgcagaccggcaaaaatatggtttaattcttcacatgtcattagctgacaacttagcgctgcaaacttactaccaacgtcccttctctaatcatggcatcattaatcatcaagcaattttgaagcatgccgtagatttaattaaaaaattcgatattcgaactactagccctgcattgccagctagcgacttatcgggaggtaaccagcaaaaagcaattatcgctagagaattaaatagaaacagcgatctaatcattgcattccagcccactcgcggtttagatgttggtgcaattgagtatattcataagcagcttttagctcaaagagcagcaggaaaagctatcctattaatttcatatgaacttgatgaaattatgcaattatctgaccggattgctgttttgcatgatggtcaaatttcaggcgaagtattacctgaaaaaactacagatcaagaactaggtcttttaatgaccggtgttaagaaagaagatgcaacaattgattaaagttacacctaaagtcaaaaatattctagtaccagttatctcagtaattgctggttttatagttggtgcaattatcatgctgatttggagttataatccttttcaagcatacagctccatgttctctagcgcactgggcaatatgaatggtattggtgaaactattcgtgaagctacgccattaatttttattgctatcggttttgcaattgcctcaaaagctggcttttttaacatcggtttgccaggtcaagcacaagctggttggttgacttctatttggattgtattggccaatcctcaattgcctaagccagtattattgcctttagctattattgcaggcgctatagctggtgctattgtggcaggaattgctggctatttaagagctcaatttggaactaatgaagtaattactactatcatgcttaactatattgtgctctatacttgtcaatatttaatgcaacaagtaatgtcctcaaaattaagaattgataccgatactaccaaaacaattccagccaatggcagcttaaagcttaactggttaactagcatgtttggtgattcgcgaatcaatgctggtattttcttagcaataattggacttattttttattggtatttaatgaaaaaaactaccgttggttttgaaatcaaggcagttggactcaatccttttgctagtcgctatgccgggatgtcttctaaaaagaatattattatttcaatgttactttcaggtgcattttctggcttaggcggtgtagtacaaggacttggtacctaccaaaactacttcactcaaacaactagtttggatattggctgggacgggctttcagttgccttacttggtggtggaactgcaattggtattttattagcttcacttcttttttcaattttaaaaattggtggtttgggcatgcaaactattgccggtattccttatgaaatcgtatctatcgtaattgctgccatcattttcttcatcgctatcaattatgtcattggtttgctttttaaaactaagaagaaccgcagtgattactacattccaaccagaaaagaaaaaggacccaacaatggtgttgatggtccaggtagaaaagtaatcgaaggagaaaaataatgaatttcgttacaatgatggcgttaattgtttcatccactttagtttattctgcgcctctaatcctagcttctcttggtggtgtttacagtgaaaactctgggattgttaatattggcctggagggtatcatgaccatgggagcctttgcggcgattgtcttcaacctaactttcgcttcaacttttggtgcagctactccttggcttggcactctagtcggcggaattgttggtttgattttttcattgcttcacgctgttgccacaatcaattttcacgctgatcatgtcatttccggaacagtgctgaacatcatggcaccacctttgggtgttttcttgatcaaggcaatttatgataaaggccaaactgaaaatatcaccgctaactttggctacttcagctttcctggtttaagcagcattcccatcgttgggccaatcttcttcaaaaacacctctgcccctgcttggattgccattattcttgctattttgatgtggtggattttatataagactcgctttggcctacgcttacgttcatgtggtgaaaatcctcaagcagctgacacaatgggaatcaatgtctatggcatgcgttatgcaggtgtattaatttccggctttatggcaggtcttggcggtgccgtctttgctcaagcaatatctggtaacttctctgtttctactatcgttggacaaggattcatggctttagctgccgttatatttggtaaatggaatccaatcggtgcaatgctctcatcccttttctttggttttgctcaaagcttaagtattattgggcatcaactgccaggaatcgatcaaattccatccgtttacatgcagattgcaccttacgttattacaatcatcgttttggtcctcttcctcggcaagtcagttgcacctgccgcagatggggttaactacatcaaatcgaaataaggaaaaaaggttgtttcacatgaaacagccttttattttacacatgtccacatagttatccacaagatatagcacttatatgtggtagtcttactatatcttgtactaaataacagctatcggcgttttctcagttggcattggaaaatcactgttaagcaatctaagctcatcatctgtaagtttaatcttttgtgttgcaatattttccttcatgtgttctacactacttgccttaggaatcgttaaaacattgccattgcgcatcgtccaagctagcattatctgatgaggcgtaacgccatgatcacgtgcaacaattttcaaattacgcgtaattcgaattgtgttgcccttgcctgaattaaatggtgaatacccaataaagtttacaccgtgctcttcttgccaagcttgcagatcaaattctgtcccacgttcactgatattgtataagtcttcattagcaaagcattcttctccacctggcactgtaaaaagctcctgcatatcagccgtatcaaagttagatacaccccaataacggatcaagccatctttttgtaatgcttgtaagccgtggatcgtatcagacaagcgatgactgccccgccagtgtaatagataaagatccagatgatctgttccaagacgttttagactggcttctagactctgacgttctagttttggcgttgcatgataggggtagaattttgaaatcaaaaataatttttcgcgatcatatcctttaatcgcttcaccaattagctcttcgctttggccatccccatacatttcggctgtatcaattacactcaggccatgatcaaggccatagcgaatagctgctatttcatcttttttctttttaggatcttcacccaaaccccagctaccaattcctaaacctgttagtttttcaaaattcatcctcgttcacttccttatgttcaaattttaacataattgattcgtaattatttttatcaatcaattgacaaaatggtctattccattttataatggactagaccaacaaatgaggaggacttaattatgaaagttattgttaccgaaaataaaattcaaggtggagcaaaagcatttgaaatttttgaaaaaggaatcaagaacggtgctaaagtcttaggtttggcaaccggctcaacccctgaaacactttaccaaaactgggtaaaaagcgatcttaactgtgaaaatcttaccagcattaacctcgatgaatacgttggtttaaccccagataatcctcaaagctaccactacttcatgcaaaagcatttatttgacaagaagccatttaagaagacttacgttcctgacggtatggcaaaagacgttgatgctttttgtaaagaatatgatcaaattatcaaagacaatcctatcgacattcaactattaggaatcggccgcaatggtcacattgcctttaacgaaccaggcactccattcaacatcggcactcatgaagttaagttaaccgaaaatactatcaaggctaatgctcgcttctttgacagtatcgatgaagtgccaaagagtgctatctgcatgggtactgctaatattatgcaatctaagaagattgttttgatggcttttggtgaaaagaaagctcacgcaatcaagaaaatgattgaaggcaaagtcactgaagaagtacctgcatcaattttgcaaaaacacccagatgtaacggtgatcgtagacgaggctgccgcacaagaattagacgacaaatacaagaactaaaaacaataatttaattatcagcatagaaaaagctaggctttctacaatcgtggaagacctagtttttttatttagcagcctgtatctacaatgaaatatacttcacaaaattgcatttttatataaaaaatgaagcataattcagttttttattgaattatgtttcattcctattcgattttttatttctacccttgacttttagatgtgaaacataatcaaaaaatcacttgtgtgccacaacatatcgtattaaacttaataattgtctacatatggtatttaagaaagaatgtgattcaagttattgttttaagtgggccaattggagccggtaaatccagtttaaccagtattctagctgaacatttagggactcaggcattctatgagggcgttgataacaatcccgtattgcctttatactacaaggacatgaagcgttacacttttttgcttaacacttacctccttaaccaccgtttagcacagatcaatcaagcaattcaagaaaaaaacagtgtctccgatcgttctatctatgaagatgcactgttcttcaagatgaacgccgatagcaaggtcgctgatccaaccgagttcaagatctacgatgacttactcgacaacatgatggaagacactcctggcaatccaagtaagaagcctgacttactgatttacattcatgtctcccttgatactatgcttaaccgaatcaagaagcgcggtcgttcatttgagcaaatcagcactgatccaggtttgaaagattattacgcaagacttttaaagtactacgaaccatggtatgaaaattatcatgcctcaccaaagatagaaatcaatggcgacaaacttgattttgttaccaacatggatgcacaaaaagaagtacttaaagaaattgatgaaaagttgcatgaaatcggcaacttataagaaaaagaaggaacgtgatgacagttattgttttaagcgggccaattggagccggtaaatccagtttaacaggtattttatctaaatatttagggactaagcctttctatgaaagtgttgatgacaatccagttttgccacttttttacgctgaccctaaaaaatatgcattcttattgcaagtatatttcttgaacacacgcttccacagcattaaagacgcgctcactgaagataataacgtcttagatcgttctatctatgaagacgccttattcttccaaatgaacgctgatatcggccgtgctacttctgaagaagtcgatacttactatgagttattgcacaatatgatgggcgagttagaacggatgccaaagaagaatcctgatttgcttgttcatattaatgtttcatatgatacgatgatcaaacgaattcaaaaacgtggtcgtccctatgaacagttaagttatgattcaactttagaggactattacaagcgtctgcttcgttattacaagccttggtatgagaactacgattactcacctaaaatggaaattgacggtgataaattagacttcatggctaatccagatgataaagaaaaagttttggatcaaattacagccaaactaaaagagatgggcaaattacctgaagattgggaaaagcctaccgatattcaaattgaagcataataaaaaccattcatttgcgaaattatcgtatttgaatgattttttgtttacagtgaatttttcgctttattgttgtataatttgaaaaaatgtgtttaaaggaggagtttgaaaatgatgttaaccgtaactggtggacaatggtttttcccacttgtcataatttgtctaattttgggtattgtcgcaaccatcgctcaaaagaaaaagctgactaaactaaaaagaataaccgataactttgcctatgcaatattagttattctcttaatcattgaatggattctatattttcaaaaacaatttaattttattactccagcaatctacacccttgttgtcatctatcttattggacggcaattactaatcagataccgttcttctctattgaaaaaattaggggctaaatataagcaactgacaattggacttgctactatttacattattttagttaccttattgcttttaatcggatctaaattttcaactatgggctggatcattgctggattagttatcgtagcctttggcttcgttagctacatctttgaaaaagacaaacaataatttcccaggaaataataactcgcatagagcttctatgcgatttttatttattcaatttttgctaatgccttcgcaaccccatcatgattgttatcagcagtaatttgttccggagcaaatttttgttttagttctgctggggcattacccattaaaaatggataccccacttcttccaacatatcttcatcgttatagttatcgccaaaagcaatgcaattttgcaagtctacgccatattcttgagcaactattttgactgcactagccttgcttacaccctttaaaacaaattctaataaattctctgctgatctaacaaaagtcaaatcaggatatttagcagttaattcttcttgcatacgatcaagatccgctgaatctcccataattagacctttatgcacgccctgcagtttttcaagttgattaattgtagtcggtgttgcttttacatcgacaattctttcttcatttttaacccgtgggctcttttcttcactacaataccaaacatagccactatagatattccaagctgcatcattatcttgctcatcaacgtagcggcaaatttcagctgcttcttttgcattaaaaaaacggctgattagtactttgcctgtttcatcaagggctaaagcaccgttatacgcgataaacggacaaactttcaaaatttgattaaccactgtcatcatccctttaggaagacgtgctgatgcaggaacgaaaatattaccattaataatttgtctacgaattgcatcccgcgttgcggcggttacctttaaatcatcattaattaatgtgccatcaagatctgaaaaaataagttgtgcggacattctttcacctttatttcttttttaattcttatatcctaggataatgctttatttatgctaatgaaagctgattcaattaaatgcttttcctatcatttaaagataaattgcaataaatgcccaagtaatcattaaaataattcgcgtttacaaatttatttatcaatgctaaagtataagagttgtgttcaataagttaaaacacgaacaatattttggggagataaaatgaattttataaaaagctactttcaattagataagtacaaaaccaacattcgaactgaatttattgctggtttaactacctttatcagcatgtcctatattttgtttgttaaccctagcgtactgggcgccagcggtatgaataccggtgcagtcttcaccgctactgctttagctgccgctcttggtactgcaatcatggggatcgttgccaactacccgatcggtgaggcaccagctttgggaatcaatgccttctttgcttacaccgtatgtattgggatgcatgtttcatgggaaacagccttggcttcagttttcgttgcatcaattattttcatcttaattactttattcaaattaagagaaaagatcattgattcaattccagctgacttgaagttcgctatttcatcaggtatcggtttattcattgccttcttaggtttgcaaaacggcaagttaatcgttgcaaataaatcaactttggttggtttaggttcacttcacgatccacttgtttggattaccatttttggtttgcttgtaactgttatcttgatgatcttaaacgttcctggtgcaatctttatcggtatggttttggcagctatcttcggtatttgtaccggtcaaattgcattgccacacaaggttatctcaactgctccaagtttggctccaacttttggtcaagctatcttccacgttaaagacattaacactgttcaaatgtgggttgttgttttaaccttcctgcttgttactttcttcgatactgcaggtaccttaatcggacttgctcaacaagctggtttcatgaagaacaacaagatgccacgtgtaggtaaggccttagcagctgactcaagtgcgatggctgttggttcaatccttggtacttcacctgttggtgccttcgttgaatcaagtgctggtatcgccgttggtggccgtaccggtttaaccgcagtttttgtagcgatctttttcttaatctcaatgattttcagtccattgcttggtgttttcactagccaagttactgctcctgccttaatcattgttggagtattaatggcacaaaatactgctcatattcattggaacaagttggaaattgcagttcctgcattcttgattattttagggatgcctcttacttactcaatttcagacggtttatcatggggcatgatcacctaccctatctgtatgcttgctgctaagcgtggcaaggaagtcacaccgatgatgtgggtactgtttgtagtattcctgatcttcctgtgggtactgaacttttagatgaaaaagaatagataaagaaaaggactaagttcgaatttgaacttggtcctttttgtgtattcactaacattactttttattcttatcgattataatcgataaaaacgtcaaaatcaccaatcttatcgagtataatcgataagattgcaaaaaaagagtcttttatcgactatactcgataaaggctcttttttatattacccaggaaatattaacgtacagtttctaaacaatatgattttttataataaaatgcgtcataacaggcgaattttaattggctttaaaatttcttttttctaaaaacaagatagcctaaaagggtaaaaagaactatatagcacaatgtaccaattaataattgtggattagagagatgggaggttaagtgataagttgcataattataatactgtgtcgttaaattgagcatattcaaaggattccaacgaataatatcaaccggtccaatattataatttaataaattagatgatagactgcttcccataaagataataattgcatttatcataataactacggtgtttgaattaatcatacaagacattaagcaaataaggctgattattaacgtagaggttataatatcaacgcctgttgttgaaagcatatttataaataatgactgattatacttataagtcgcagtccaaggaactatttttgctataagtggaacagtgttaaagaagatagttacaatcatagctatggcatgtagaaaaagattataaataaaaattgtaatgaactttgcaagatatactgttcctttattttgagcatgatatagtaatgtcaaaatcgttttgttttggaactccattgagaaaatagttgaacctactatgaccaaaatcaacataattatttggctagagttataacaagtcataactaacaaattgccatattgttttcccatggccaatcccataaaaatcataaaaagaatcataaaactgataatccaccaaggcagcttacggtgacctaacttatagaattcttgttttaattccgcacgcataaaagatcacctccgcctaaatagaccgctttttaaacagtaaagcgccaatccaaaagaaaactacagcgtacactaaattagcaataattaattctgaattagtcaaatgtgttacagtaaccatctcattattcgatagttgcgtaatgatattaatcatatttaatggattccaggctaaaattgatttcaaaccaggaaaagccgacattgctaaatttgaaagatctgaaccaagaaatccgattgctagtccgattatgatcactgttgcattattcctaatcaacaaaataagcattaaagagagggcaacgataaatattaaataaatcatcgttcctcccatatttaggaatagcgcattgattaagggatgtccatgataatcatcatgccaagaaaatttcgaaccaaccatcaaggtcttgagaataaacgaaaagattatcccaaataccagtaagatgaaactataaaaaactaaaacaatgaacttagctgtataaagaatggacttatgtgatgttttgtagagtaaggttgccatagtattatttcgccactccattgcgatcatatcagaactaatagcaataatgatgataatagcccattgtcctgcaccgaatccttgagataagagtgagggcgtcattttataacttgtaccaactgtatacaacattagtactaataaaacgagaatcccatacaatggaatcttgcgatgagcaaatttatagaattcgtgtgagagattaattttcattattatctcccccttgttcttgccgtaagatgttgacaatcttctgttctaaagttaagccagttggagccaaatattctatccagatttcattatcaaacagtagcttttgaattttatctatatctttatgatcaactattacagcatcatcttgtctatcaaaaggaattttagcttgttgtagcaaattggtagtttgctttatatcagttgtttttaatttagattttggatttttttcttgagtgaatttgctcataggtgaatttataataattctaccgtgattaataatgattaccgatgtcattactttttgtaattcacttaagacgtgactggaaattaagaaggctgtaccacgtgcagcgtattcatgtatcagttttcgaattaagattgtagcttcaatatccaaaccattcataggttcgtcgagaataaccagttgcggattatttaacaaagccaaagctattcctagtttttgcttcattccaactgagtagtcttttgcctttcgatcaatataatctttcatccctaatcgattaatcagtttatccataccacttaagtctttagcatagagctttaaattatcatatccagacagaaaaggataaataacaggcttttcaattaaagcaccaacagattgtagtgctaaatgatctttaagagtaatttcgtgatcattaaaactaattgaaccagtgaatttagttaatcctagcaaagttttcataatggtggttttgcctgctccgttatgaccaataagtcctacaatttcaccaggtgaaattgtaaaagatgcatctctaataatctctttgtgaccataaaaaatatttatattgttaacttttagcatgctatcctatctcctttaactccggattagacagagagttaaatcacttttctaattaaagtacctatattaaagtctagtatcctttcctgaattgtcaaattaagtgcaacagtgtaagtgtcaatgtttttgcggtagcctttaaaccattagtctaaccttaatttcttaaatatttatatgacttaaatttctgcttagcttgcttaaataactattgccagctacctgtgcggttaatgcgccatgctggatgcctaaatgaacttcatgacgcttctttaagctgtcacgggccgctgcttttaattcctgttcagtcaatacagttatttctgaatcttcaaactcgctgctaagccaaaattccagctctcgattcttgatgcagcttaagatcctaagcatgccttctgctccagattttgaccatttcttgccttgccccttaacacggtaggtatacttgcggtggttgctctcgcagcagccaatggctttagtcacagtcagttttcgtttcttaaacggcttaatatcgtcccaatgacgatcaatataattccttaggcgccccagataatcatgattgagctcggtattcaattcatcaattagtcggctttctgcagtggttaggatagttttaactttgtcatagctgtatttgtattccaaagcagaaatcagcttgccttgcaggtcaggcgcaaaatatagcctttctttgattttcttatttaggtgaaagacatccaagaaatgctcatgacgcttgcatagccctacaatgtcatcgaagtctgttttggcatatccagcaccgccatcggcgttgctaagaattacagtatcagaaagatcataagtattggccaggtactccttggcttcgttcagcgcatcaagtcggcttaaagaaacaaattccttggcattgattcgctttctgcgtttcttgcttatattgacaatgccttcacagacctgatagcgatgaaattccaaccggcttttagtgcctttgatcaccacgccatcgccttcaagatacaaaactgggacctttttcttagtgcctgcggcatcatatcttgaatctgcttcttggccagctttaatatttttcccggccatttttaccaaattgcccacctgcatatggctaatattaaagccagacaggcaattgactgctagagcagtattgcgataagtggcaacgctgcttacttctaagatgtttttgactgctaaaatactgtagcgcttgtatttgtaaaagcccattaattcatccaagggataccttgcttgtttgcctgggcagacatatcttcttctgacatacctaacttcgccaaaagccatattgattgagcgctcattcttcttatcaatctgatagccctgtgctttaaccttggtaatcatttcatcatcaactttagctaaagccaaggccatgatttccttaatcaggtttaagaagaaacagattatttttctttcacgcttaatataattatcttcagactttataatatttgcgatttcagttacaattgaattcataaaagaccagcttctaatgtgttttttgttcttaacatcagactactggtctttttgtttgagctcaagtccaaattcaaaggacttgggcttttttaattatttattcaacttaccgtaaaaaattatacacttaggcaacagttaggctatgaagaaatatattgcttgaagagttcttctgctgtctgatattggaggattcggcgatatttgtggttaatggcattggttgcctgttgaacataagcttttgacttgtctttcatgctcttgcccttagggaagaattgacgcaaaagaccattgcagttctcatttgtgcctctttcccaaggagaatatggatgagcaaagtagatctgacatcctttgattttggtcatatccgcaaactcagaaccattgtcaaacgtaattgatttaaaccaattaggatgtctgtcaatctccttttgaagcagtctttgacaagtactggcccgatagtcaggaattttgataacaacctcaaaacgagtggttctttcagtcagtgtcattaaggcaggttgatttttacgtctgacgcctttaaccaaatcgccttcccagtgcagggaaacttttctgttttcaacttctttaggccgctgttcaatcgaattgccaagattctttttatgcggagcatggccaccatgactatgatggcgtttgtttctgcgtcttttaagcttcattggcaggtcgatattgcttatatccagcaatccttgatcaatataacgatagacagtgggcgtgctaggacatggataatttggcataatcctgtgaaattcaccaacgaattcatcaatgctagtggcatcaaatttggctttaaagcgtctgcttagcattctgaaaaagacggcatagtgttgcagtggattacgcttatagcagtttctgcggcgcttttcatgataaatttgtgcagtaatagtgctcatacaagacatagctgctgtctctttgcaggacactgcctcgtctaatttcacggctgatagttgatttatgacagcctacttcttgagcgatagcagtgcaggaggttatgccagaatcaagcagagcttgaatttgtccacgttgttcgctgttcaattgatgataatgcttggaaatgctagaatttgagttggtcatgaagatcttcctttcttgatttttggtcacttcaagtttaggtcttcatggcctttttgtttaacacttagtgttgcacttcaattttaaatccgggtctagtatccttttaataaatattttttactatgttcacatatgaacaataaatttaagattatctctaataaaaccgattttaggatttttttgaataaatttgctttatttgtttaaatgcagtttcaaaaccatcttttagagtattcaagccctgcagttctaaagcggcccacatcaaccgtaaattgcgatcatcatttgtttccaaaaaatttaacataaaatgcatgtatttgtatcttattttttcaaaagcaaacctgtctgtaatatctaagccagaaattattgcatctaatctttttgccttctttagatcttttttaataagaatatattctgcattaatcaaagtatttaaaatagctgtagaaaatttcgaaactgtcaaatcttttgtgtaaatagatctttctcgtaaattgattttttaattatttatttaatcaaagtaggattctaaggtgtcctgaacctgaccaaagcctttatgaattcgattgaaataacggtcattgtagctcattgcctgaatgccaataaaagcatcaagcgactgttcagttggaaactctgccttaggcttagctttgcgcttgatcacattgttaaatgattcaatcatgttagtcgaataaattgaagctctgatctgcttgggatagttataaaagaccagcagatctggttctatgtctttcaagcttctgataacatggctgtaaaccttgccccatttggtatagaagtcatgcaggacagctgtggcttcttctttgtttgtctgttgatgcacctgtttgaattcgttcatgatcttttcacgatcgtcgacgcgtactttagcgcagatattgcgcatgacatgaaccaaacagcgttgaaaatgagctttaggataagtcctggccaaggctgttttcatgccaacaacaccatcagaaagaaaaagctcaacttgctttaagcctcgggatttcatgttttgaagcatatctgtccagacttcaatgttctcgctaggcgcaatgcggtagtcaatgacctccttgtgcctattaggcttgatgccaatggcaatatagactgcttcacgctcaaatgtttctcggcgcaaaggaaggtatgtcgcatccaaatagacgcagaaaaacttgtcgcttagcttgcgtttgtggtaagcctcaacctttggaatcatctgcttggaaatatttgatacctgagctggactgtaatggctgccatacatcttttcaattagatcggctatttccctggtggtcacgcccttggagtaaagcttgataatcatgctttccaagatatccgagtgctgcttgtagccaggcagcgtgtgctgatgaaattgaccgttgcgatcccgaggcacttgcacttcaattgggccaaattgcgtatcaactttgcggaaataagcaccatttctagagttgccagtattccagccatttctggcatagggatcatagcccagaaaggcagtcaattcagcttctaacaagttattaacagcctgttgtagctctttgcgcaataaatcatttattttgtctggattgaatagagcttgagcaaaatctttggtaaaatcattcatgaaggagttcttctttctgtatgtgtttttttgttcaaaccaatcatacgagaaaggaactcctttttctaatgtttaaagaaataaatttaaggaatcattcatccttacacaaactattttacagtctcaaaatttcatttccaaatcgttattatttttaaaatagaaaactagtgaaaaagataaactataaatagttcttgggctaataagattctgagtattaccaaagaagtacacatcatcgtaataccaaacttcatctccagataaaatttttgaaaagtacatcgataatctctttttatagttatctgtaaaaatatccactcctgtaagatcgtaataagcattacaataaatggctgcttttaaaaaagttcgtttatcgaaactgtcattttcaacttctgataacaattttttagattgcgtttttaagtaattaatatcattactttcatatgcttttgaaacttctaaagttatattttttagataattcgaaatattattattaaagaaatctattttttggacatgaattacttcgagtagtttgaatactttttcaatatctaaacctgcttcgcctctttcccatctttctaattttgaacgagaaatacctactgcttccgcagctttactacttgaaattttggttgcctttcttaattttctaaattttctaccatatgtttctttcataacccactcctagttacgttcacaaataccttcaaaataatgatccagataaaggactagttttacctccttaatgatgccttaatgcaataaaaaatcaaactcataaatattacctaaattttcatttagagctactaaaaaagcctaataccatcatcaagggtattaggtctttattacctaggaaatactaacgtacagtttccaaacaatatgattttttatgacagtttgggcaacgcaattttctagtatgtggcgtgtgtgccgcaaacataaagcttttaagttctggaacaaatttgtaatcgcaattaggacaaatatatgccactttttgataataatttttaagtaacacgaatgacattgcaatcaagcttactactaaaatagctaccgaaatataggctgcagtgttcatcttattgatgatacagtacgcaataaatgccataccgaccaattcaacagtgatttctactgctgacaatttccacattgaacgtgttacctctttgtatctagtttcattattcatgattttcgtaatgtcagtaacttccgcaatattattgggtttacttagaaccttttgtagttggataattttcttgttttgctcttctaatttttgcgtttctgctttatttctttttagttgatcttcaagcaaaagatcgattaatttatcaccatttttatcttctagtattttttgaatatcctttaacgaaaagccaagctcctttaaaaagatgattaattttaattgttttacctgctcatcagaatataaacgatagccactttcactaactcgactgggtttgaccaaacctttttgatcatagtaacgaatggttctagtggttatgtttaacttctttgctagatctccgattgtgtattctgacattactttctcacctcacaacttaaatatacgggtttacgctacgtcagagtcaagaataagctaaattttccgtaaaaaacttcaaaaagcaaatattttgctcttttcctattgaaattattaacattaactgtataattttaagtgaatgttcactttatacaaatttcggaggactaaatgaacgcaatcagtaatttctttcatttaaaggagaacaatacctcctttaagaccgagcttttagccggtttgactacttttgtaagtatgtcatacattctgttcgttaacccaaacgtcctaggtgccagcggtatggataaaggtgctctattcaccgttactgcattgtcggctgcctttacctgtatcgtaatggggcttatcgctaactacccaattgcttccgcaccaactttgggcttaaacgccttctttacctatactgtttgtttaggcatgaaggttaagtggcaaactgctttagcagctgttttcgttgcatcaattctgttcattttgttaactgtctttaaggtacgtgaaatgatcattgatgccatccctgccgatattaaatatgctatttccgcaggtatcggcttattcatcgcctttatcggtttgcaaggtggtaagttgattcaaaacagtgattctaccttagttactattggtagtctcaacaaccctactgtttggatcactatctttggtttaatcattactattttcttaatgattgccagagttccaggtgccatcttcatcggaatgatcgccgctgctgtttttggcatagtgactggtcaaattcccatgcctaaaggcgttatctcttcagttccaagcattgctccaacttttggtcaagcagtcttccatattggcgatattaataccgttcaaatgtggatcgttgtctttacattcttacttgttactttctttgataccactggtaccttaattggtttggttcaacaagcaggtctgatgaaggacaacaagatgccacgtgctggtgaagctctagcagctgattccagtggtatgttggtcggttctgttcttggtacctcacctgtcggtgcctttgttgaatcaagtgccgggatcgctgttggtgggcgtaccggtttaactgccgtttgggttggtattttcttccttatttcaactatcttcagtccaattttgagtgttttcactacccaagttacggcaccagctttaattattgttggagtattaatggccgaaaacttggcacacgttcactggactaatcttgaaattgccatcccatgtttcttaatcgcattgggaatgcctcttacatactctatttcagacggacttggctggggtttgattgtctaccctgtatcaatgatcgcagccaagcgtttcaaagaaatcacgccaatgatgtggattttgtttattgttttcgtaatctacttcgttgttttaaatgtaaaataattctatcttataacccccttatcttacttttacattaacatacgcgtggtgctagttaaatcgttttagttaataaaaaagtccaatcggactagactcaagttgtagtatcaaaaagaaaagagtctgatctgattgaactgccttaagcttaagcgttttagccaccatttacaagttagttttaaagatttagtgataatttgtcggcactggtatcgtttgtatgcaccggctgagtttactcatcggcgaaatattgatcaaattaaaactacggacagtctgattttggctttacttatctggcaagctaagacaggaattgaatcacaaagaagattctgtgaatgtttcaattgtttatcacactcacgttttaatcggcgttcacgtcagctattgcaattgatttatcagatacggcaagaaatgaataaaaaggttgacctgaatggacagttcttgatcattgacagctttccggtacctgtttgccaaccaattcgaaactatcgtgctaaaatttttcgcggttatgccaacattggttataaggccaccaagaaaatttacttctatggtttcaaagttcatgccattgttagcgatgacggttacattcttgattatgtcgtaacaaaggcatcagttcatgatgccagggagacagttgaactgatagaaaatacccatccatctaattactatcttcttggcgacgaaggctatttaggcaaagaactgcatcaacagctaaaacaaatgggttacgaactttggacaccatatcgtaaaaatatgacaggagctaaaaagcacaatgatcatcaattgatggctattcgcagaacaattgaaagcgacttttcgcttctgacctattacaatgccgagaacaatcgagcacgtagtctgataggctttcaaagccggttggaaattgcaattttagcttataatttggcttattgtctagaacgatttaactagcaccacgcgtattaatatataccctcatctaaccaagtagcatgtctacttggtttttatgctaaaaagatgtctgttaatagtatggatgatgacagcagattctattagatgatataataatcaaagaaaggctgtgactaaaatgaaatcatataaaaaaattcaagctaatgttgactcctcactagcacttcaagcagaaggaatttttcaagatatagggctcaataccactaccgcaataaatgtgttcttaaagaaagttgtggcaactggtggtatcccatttgaattaaaagaaactcctgaacaaaaagcctcaagagaattaattcaaagcatctcaaaaattccccacaaagaagctaaaaccaaaaaggaaattgaggattggctagatgaggactaatgatattgtagatatttatgttgcttacattgataagcctggaggaaaaaataggcctgtattaataattaaattactaaacagtaaagcttggctgctaaaaatcacttcaaaatataaagaaaaaagtgaaaatatccgaaagcattactttcccatttttgactggaaaaaatataatttagataaaccatcatacattgatactaaaaattatttaatagttactattagtgatttaaatatcgaaaaataccgaggccatttctcaatagcagatttacgcaaattaaaagattttattgacgaaaattcaaactaagaattaaactatatgttttagttcctaaacacaatctcaaatatgagattgtgtttttatttatccaaatggcatcttttgataatcatttgacgccttatgatgttcggattcttctaaattgccgctatactattttcaacaaatcgagttatgaaagatttatttaggaggaattcattatgacaactcaagaaggaaaaactgctttaattactggttcatacggtgggcttggtacccaattcgttaacattcatgcttcacacgggggtgacctaatcctagttggtcgcaatgctaagaaattagccgatcaacaaaaagaagcccgtagaaagtacaacgtaacggcgcatattatcgatgttgatctctcacaaccagatgctgcgcaaaagatctatgatacttgcaaaaagaacggttggactattgactacttaatcaacaatgctggctttggtggtcaaggcgaattcattaaaagaagtatggaacaagacatgtccatgatcgccgttaacattgaaacgcctactcgtttaactaaattatttttacctgacttcgtaaaacgcggccgttatgcctggcccacttcaagccgtttactacgctactaaagcatacgttacaagctggtcaaatgcgttatggcgtgaagtacaaggcacaggcgttacggtaagctgcttaatgcctagcgctatgcaaaccggttttatcagtcgtggtgatttgagttcaactcaattattcgcccatgcggttagtccataaggtgttgcaaaagctgggtatgaagaaatgattgaaggcaagcttaacattaccgctggtttaactgcagcccaaaaaccattcatgaaattggaaccaatgttacctaagaagatgctcatgaacaatgtttataagatgcaagaacaaggtagtagaaagtaatcaacttatcttataatatggatcaaaaggatggtatttgaatgaatcactttattttagatggtcgctatgaagacctactctcttttaacgttgaagaagcacttaaaaaagccaatattcctgaagattgtttcaaaaaactccatccttcaatgagtgaacaacaatactacaattttatggcggctattggtgatcagattagtgatccattcactccaattgaaattgcaactacaaatccaattgaatctttctctccaccaatttttgcggcatatagtagccgtaacggagatatttttatcaagcgtctagccaaatataaaaagctgattggcccattatcttttaaaattgatgaggatagcaagcagctctctattaccctaactccaagtaatcagcaatattccctaccctcttttctagttttatcagaatttgcatttttagtgggacttttgcgcaagacgaccaaagaagctatttccccgctgaagatcacaatgacatcccccgtcaatgatgagcaggtcattaacttctttggctgcaaaatcgaatcgggtaaacgcaacaccatcacttttgccaaaaaagacttgcaggtcaattttattagttataactaagcaatgtgggattatttcaagcctgaattaactaaacgcttatctgaattatccgttgatgattcaactagtgctagagtacgtagcatattgaccgaattacttcctaatggtgaatttacaattgacgatgtagctaaaaagttaggttattctaaacagactttacagagaaagttgagtagcgaaaaccctacttttcaaaaacaactgaactccacccgagaagttttagcgctaaattatttacaaaacaccgatatgacaactagcgatattgcttaccttctaggctatcaggaatttaattcgttcttacgtgccttcagcatctggaaaggcataagcattagcgaatatcgtgaaaaaatgaataaataataaaaagcagatatattttctgtttttttactttataaaggaaataatatgagatttttgctataatttactttataaaggaaataatatgaaaattgctaaaaatttactttatgaaggaaataatatgcagttaaatttaattaaccgcccacagtatttaaatcaattacttcaatttcaaaatacagaattcatcaaagtactgacgggagtacgaagatcaggcaaatcttatattttaatgctttatcgtgaatatttactcaaacacaacataaatgaacatcaaatcatttatatttcttttgaagactttgataatatagatctttatgaacctaaaaagctttattcatacttaaaagaacgaattattagtgaccaaagaatgtacattctacttgatgaaatccaatatgtatcagattggcaaaaagtagtaaatagccttcgacttaatcctctacttgatatcacaattactggcagtaattccaatctattaagtggagaattagcaaccttactatcaggaagatatgtagaaatacatgtttatcctctttcttttaaagaaatgctagattttaaacatatttctgaaccatcagagcgtcagattgataacttatatgatgaatacattaaatatggtggtttccccgcggtagtgttagcaaaagaagaattaaaacaaactattctttctggaatttacaataccattattgtcaatgatatcggctacaaaaatggattaagagaaccagaattagttgcattagtagctaaatatctagcagattcgattggtcaattaattaatccgaacaagattgtaaatacactaaaatcagcaaattttgatatctcttataacgctgtgcagcgttaccttaaatattttgaagaagcatatcttttttataaatctagtcgttatgatattagagggagaaagattctttctactcaaggtaagtattacattgtagatactggtttgcgtacccaagctttaggagaaagaaataatgaccgcggtagtgttttagaaaatatagtttatgtcgaattacttcgccggggctacacagttcaaattggtaaattagataataaagaaattgatttcatcgttttcaaggtaaatgataaacaatatattcaagtaacctaccagcttccagaaaattctactagagaaactgataatttacttcaaattccaaataactacaaaaaaatagtcatcactggccgatatgaaaatgaagaaatgatttccggtattccaataatcaatattaaagattggttattaagctctaaaaactgatcaaaataggatcgactaactcatgtcgatcctatttttaaattaaattatgttttttacaataagtaaaaattccgtcatcttgcacgctgccacagatgtcatcagcaatttccttcacatcgtctgttgcgttccccattgcaacgccgtgaccaacagtctttaacatttcaatatcgttgccgccatcaccaaaggctattgcttcgctcacagggatttgataataatctaacactttttcaattgctacacccttactaccagtagctggaataatatctgctgctctatcccaccaagctgttaccttagcattttgcgtattagctacaagtccgtcataatctttttcacgacagcctaccattatttgataaaccgtatcctgatcgacaaccacatcaaaatctggcgccactctcaaatccgttccaccaatagcaaagtattcctttaaatcctcatcaacaccattagctgcaatccgtgttttggtagctacagctaacggccgatttattttctgagcattttgaatcatatgcaagacatctccttgccttaacggattatcaaaaacaatgtcttgatcgttatagcagtaagaaccattaaaagttaaatatgcatcaaaatctacacccaacttaggcagttgcactggtggtctgcctgatgcaatacaaatcataatgccgttgtcttgtaaagcatgcagtgtctctagcattttaggtgtaattgattttttcttttcaattaaagtaccatctatatcaaaaaatattatcttaggtttgctcattatttttaccttctaaagaattttctactaattattatactttaaccgatatttcccaggaaatattaaaattgagctctcttcctcaacatctgtgctaaactagatacaattagtttctttaaaagttaatagttacggaggaatttttaaatgcagacattggaaaaagtctttcatttacaagatgctcataccactgttaaacgtgagttaatcgctgctttaaccacttttgtcagtctctcctacatcttattcgttaacccaaacattttgcacgcagctggtatccctaaaggtgccgcttttactgtaacagctcttgccacagcagttgggtgttttttaatgggttttattgctaattatccgattgccttagctccaaccttaggtagcggtgcctttttcgcttataacgtatgtgttgggatgcatatttcttgggaaacagctttggctgcagtccttgttgcttcagttttattcattttaattactgtctttaaattacgcgaattagtggttaatgccattccacaagatatgaagtatgctatttcagcaggaattgggttattcatcgcttttattggcttaaaaaatggtcaattaattgttaacagcgattcaactttagttactctgggaaaatttagtactccagcagtttggatcacattatttggcttaattttgactgttgtattaatggcattaaacgtgcctggttctatctttattggaatgattgttactgccatcttcggtatgatcattggtcaaattccattaccacataacatcgtttctggtgccccaagtattgcaccaaccttcggccaagcggtttttcacattaaagatattaatacagctcaactttggatggttgtactaactttcttattagttaccttctttgatactgctggtactttaattggaatgactgaacaagccggtatggttgacaaggatggcaagattccacggatcggtcgtgcttttttggctgattcaactgctatggttgaaggtgcagtctttggtactgctccacttggaacttctgttgaatcaagtgccggaattgccatgggtggtcgtactggtttgactgctatctttgttggtattttcttcattatcagtatgattttcagcccattgttacaagtaattccaactactgtaacggctcctgctttaattatcgttggtgtactgatggccagcaacttaaagaaaatcgattgggaaaagttcgaaattgcctttcctgcttttcttaccgttgtagggatgccactgacttactcaatttcagatggtttggcattaggcttgattgcctacccaattaccatgattgcttctaagcgttataaggaagttagtcctatgatgtatatcctgttcgtagtatttatcatctttttcttagttacgaatttataaaaagaatgctaaagataagcagtttgaagctgcttattttttattgacttgatttttattttgtactactgtaataaatatataagacagtttttatgggagaagaaaaatgagactgtaaaatagtttgtgtaaggatgaatgattccttaaatttatttctttaaacattagaaaaaggagttcctttctcgtatgattggtttgaacaaaaaacacatacagaaagaagaactccttcatgaatgattttaccaaaaatatggctcaagcactattcgatcaagacaaagttaatgattttttgcgcaaggaaattcaaactgcagttaatcaattgcttaaagttgaattgactgcctttctgggctatgatccctatgccagaaatggctggaatactggcaactctagaaatggtgcttatttccgcaaagttgatacgcaatttggcccaattgaagtgcaagtgccccgggatcgcaacggtcaatttcatcagcacacgctgcctgactacaagcagcactcggatatcttggaaagcatgattatcaagctttactccaagggcgtgaccaccagggaaatagccgatctaattgaaaagatgtatggcagccattatagtccagctcaggtatcaaatatttccaagcagatgctccccaaggttgaggcttatcacaagcgcaagctaagcgacaagtttttctgtgtctatttggatgcgacataccttcctttgcgccgagaaacgtttgagcgtgaagcagtatatattgccattggcattaaacctaatggacataaggaagtcattgactactgcattgctcctagtgagaacattgaagtctggacagatatgcttcaaaacatgaaggccagaggcttgaagcaagttgaactctttctttctgatggtgttgttggcatgaaaacagccttggccaggacttatcctaaagctcattttcaacgctgtttggttcatgtcatgcgcaatatctgcgctaaagtacgcgtcgacgatcgtgaaaagatcatgaacgaattcaaacaggtgcatcaacagacaaacaaagaagaagccacagctgtcctgcatgacttctataccaaatggggcaaggtttacagccatgttatcagaagcttgaaagacatagaaccagatctgctggtcttttataactatcccaagcagatcagagcttcaatttattcgactaacatgattgaatcatttaacaatgtgatcaagcgcaaagctaagcctaaagcagagttcccaaatgaacagtcgcttgatacttttattggcattcaagcaatgagctacaacgaacgctatttcaatcgaatccacaaaggctttggtcaggttcaggataccttagaatcctactttgattaaataaaagattaaaaaatcaatttacgagaaagaactatttacacaaaagatttgacagtttcagaaaaatgaaaatcaaaaaagtactactgaccacgtctttactcacgattagtttgattactctatcgggatgtagtttccacctgtttaccaacaagaattccggtcctacaatcaaacgaactttgtcctctaagaaattcaattcacttaaggtagccagtgacattactgatgttgaattacatgcaagtaatcaatacaaagttatctatcatgggctcaagcgtttcaaacctagcgttaatgtgaaaaatggtcagttaaagatcactcaaactagtaatggtgtttcttataacatcaaagaaggcaatacagtggcaatctacctacctgccaaagaattacaaaatatcaatattaatctttctgatggcgatatcgatgctgatggcaaggttcaagcaaaaaatgtcaaacttcacagtgacgatggtgatgtcaactttgacgatttaagaattagctctggcaaaattacctcagatgacggcgatatttcagtttctaatctacttactagaaaaggcgccacagttgaatcagatgatggtgacattcgtattagaaagagcaatgccagtggttaccgcctaacttctgacgacggtgacgtcacattcaagggagatacttctgataatgatgacggtggttcttactacaaaaatactaagagttctaacctgctctctgctcacagtgatgacggcgacgtcaacgttaactaaatttcgtcataaggcgataagtttcacatgaaacaaaaaatcaatgcatcattgataatgcattgattttttacttttttcctcattcatagcataaacacgactttacaagattatttaagtttctattgaaatagacataattttaatacgaaaaagataagactaaattctacttttccattaaaaaatatttaccaattttccattttctaagtcaaaatgatgcgtaaatttcttcatcgtcgttgatgaaatatggtggtcaatttcaattactgttaatggtgaattcaaaaagacattatgaatttgctcagcagtttgcggatcaagtgaagcagttccttcatcaactactaaaatttctctttggaagagaaaagcacgcgctaattcaattctctttctttccccacctgaaagattatgcccattttcttcaattacggtatctaagccatgtttttgaaggtaattagttaatcctgcttgttgagccgcagccacgatttgcttttgatcaaattgtttaccaagagttaaattaaagcgtaaagtcacattaaaaatttgcgaagattgttgaacttcactaaaaatttgcgtttcaacagcctgatcattaaccaaaactcttcccttctgcggagataatttacccattaacaccttaagtaaagtagatttaccttcaccagactttccggttaacagaattttatctcctttattaacacataaactcacattattaagcactggactatcagcttgatagccgaaagttacattgtacatatttaattgcttaaatttgactggagcttcatcttgcttagtcgttaaaggcttgaaagataacaacttagcggtcattggtttagtagcagcaatctgattacgaatactattaatactaaagaaactatttacaatccaagcgctagagtattgaacggcaacaaaagaagccaaagcaatgtgtccttgaattaccataataatgccgattccaattggtaagaagtctagtgagtaagctaataaatcaacgtaaaaatcacttttagcaattgtatcgtcacgttcacgtttattctcaacagaatttttaattactttactacccttctttacaaatagagataatacattgtaatctgaaacttgaaagctaagattaacgctccttccccgcgcctcttggctttttcttatcaaaaataaaaacgcaggctctctctgcgttatactttaagtgtcgacctaaaaagtaaaggagatcctgcgcaatgaacagtatagaacaaatcgacacagaaaatgatactaaatccttaatttcttcatttattaatctaattggtctagctaagttaactaaacaagtcaattttaagcgtaaatccaccgtttcattaaccatgattatctcttggctgatgtcagtacattttgctcggctttctttattcagagctaaggatgacaaacgtttttccgttagaactgctcgcaatgtacttaacgatggaagaatcaactggcaaaaactattatgcttgattgcagcccggctcattggctgcttaaaaccatttatcgataaaagacgccgacttgcttttatcgttgacgatacgctgatggctcggtctttttctaaaaagaccgaattgctagctaaagtctatgaccatgacaagcatgagtatttgaacggatatcgtggtttaactttaggctggagcgatggcaataccttcttgccggttaactttgccttgatgtcaaccaaaaccaagaaaaatatgattggagctgctcccattactgctgatgaacgttcaatttctggtaaaaggagaaatcaagctcagagaaagatgaatgatgtaactgtagagttgattagacaagccttacgattaggagtagaagctaaatacgtcttattcgattcttggttttcttctccaagaatgttttggattttaaagaagatcggtttagatggacttggcatgatcaagaagagttcaaagatttattacatttatcgccatcgccgctatagcgttaaagacttgtatgatcgtttggctgcttcaaacatccgtaaaaagaaacattatctttattcaagcatagttgaggctcaatatcatggacatagctttttattaaagctcgtctttgtctccaaccgtggaaacaagaacaagtatttggttttagctactactcagacaaagcttagccctgaagaaatcatccaactttatggtcgtagatggcaaattgaaacatattttaagacgtctaagcaatatcttgctttagataaatctcaagttcaaagctatgatggccaatgtggctatatcgcagttacagcaataacttatgatctattgacctggcaggaaagacaaaatacagatgataagacaatcggagatttattctatctaatgaacgaatccttacctgatattagattcgtagatgcattggtctacttaatttcagaattaaaagagcttaaacagaatagttttgaaaagatagatgaagtaatcaatgactttattaaccaactgccacgattcatacaaattgcactgaaacagatcatataaaaactaattacgtctaagaaagctcaatagtgacaggacttgagcttgattttggtgctttcaattttcagttgtaatttaaaaccgtattgatatttttgagtaaatccgacataaacgttacataactacctgttgatttactccaattggatgactgattggctgttttcttgctaaacaaactaggaataaggcttgaaagactggcaaaagcaacaaagactaatgtcaggactacactatttatcagcgcaatagtaacgataccaacaattttaaccacagtagatactagtgaaaataactgtctaaagtacttttcttcaatcaggttaagatcattattaatgaaagaaattcgattagaaatttctttttctcctgtttttacaaaatccgtctgcatcagatactcacgaacttcttgattaaatagtgctacattacgattaattactcgattatttaagtattctacaattacaagtaagatttgcaatactgtaattacgataatcattctcaccgtatttggaatacttttacctgtaattaacgcaaaaatttcggagtatgaccatgtgctaaaagacaaagataatccgcttaaacatgacagaataatactgagcgaaaaccatttgaggtcaataaactttttcataaatgaatctccctttcaattaagttggattcattatctgctttagttcacgataaaaatagctttctgcaaaagtgatcttcaatctgcatatatgcagattattctggaagaatagacagaatattttctaaattacttgccttgatcaatttcttaatagctaatacctgctctgtatctccagcaaaatagcattgataaaaatgaccaatgattttatataagactaaagatggcgtttgacttaattgcccaagtaaataaataggctctttattatcttttacaaatttattttcagcacaagtatataaataattcacacaaatagtggcaattgttgtttgcattttttctgtctgctcagacattttatcattataagtagtgaaaattttttgaaagaaaaaagcaaaatcgtcatgagtaaagatagaggtaccaaaattggctaacaaatctaaactaaatttatcttgaagccaattgtcgcctgcaaacaagcgttgcagtactatatttttatctttgacatcaaatttacgttttccttctagcaaggtaagaatcaacttagctttgattttcagaagatcatgatgaggcagttgttgaatttctgttaccaattttctaacttggttaaagtcttgattataataagcagtctgtaattgatcacctaaattgttttcatcgtcagcttgtgcgactgaattttgcttaaagaattcatcaaatgaaattttatttttctgcaaaattgccattaagtccttagctgatatttcatgcaatccgcgctcaatcttagaataatgggcaggtgataaaattcctgctacaaattgttcttgcgtcagtccccgcgattggcgcgctttttttaatgctgtgttaatttccatagctgtttttatttcaatttacggtcccttttagatacaaaccaaattgtcccatcagaagttgcccagtgtccatcagaagttttatgaaatttcagcgtcagtttcttactgtgtagtgtccagctatttttaccttccattgtgacacggacccggcctaatttttctgaatttattttgttattgtagtctttgggatcatatgaattatgcccatatactttataaattgcttttgctgccgcagtatttggcttaatgtatttataagtaccagatgcatcagtcttaaaaactgggctggatgcatcgatttgaccactatttttccccagagctatgttcaccaacatgccaagatgattttccattacagaatctgtttgatggggatcataggttgtaagatttttattagcaaactgttctggaatagtttgctgattgcgataaaacaaccagccaccgactgccagaactacgactactacaacagttatgattgtagctttctttttcataaaggatcacctgttatctatcagcttttttctgaaaagtaattaatccgtgtgaaactaatctaacagttccgccataataaactacccaacgtactttgccattactgtactcttcatacattctctcccgctgaagatatccattatatgtaccatcattataaggaatttccatcggagtatctacagcaccatcataagcgccataacgcgtcttatgccatgggcctgttctcttaactccatgaacttttttagttaacggtagtttttgaacgttttaaactgaatctgtactagattccgcagcagatacaacagcagtattagtggttgcaaacagagcagttgctgagaataacactaaagttgcttttcttaatttcatatctaacaccttatacctttcttttattgtttattttcattacctagttgttcattatcattgacaacaaaatttgtcatcattttctttttacttgctaatgtaggaattgggtagcttttaagtttagtattatacaaatagccaccgtacataattcctgttggattatgccccattggaacagtgtacatcttttccagatatcctctaaatacctcattgcctcttcttacagtgtaataaacataagtaccctgatcatgatagtattgacgttgataccagatatgttcaacaaatccttttgattcagtgctttgtgttgcagcttgtacatggtttgattgaaccaaagctgaagttgaaactgatactagtgataaagctaatgctgctttagctgttaaagttaaaattttcttatttcttttcataactttaacctactctttttttcttttcttgctttaattactacctaatccagacggaataggaacccatggacccatatttttctctcctttcttatttatttttcattaattttactttcactactaagaactgttcagaaattgtcaaagatgacaattttctacaataaaattcttaatcaaatgagacattccattacttttcataaattcaataatctgatctgcttcttcatttttgccatcaaaacaataatggtaataattggcaactattttagcaaaagcattacgtggaatttctggcaatttagaaatgaaatcgtaaattagatttaaatcaattttccttctttgtacgtatacattagccaaataattaatagctattgctgacattatttcttgtagttgaccagacagattagatacattatggcgatacgttctaaatattgaattaatcaaaaagtccatatcttctggggcatatatcatcatagtcattgcaaaaatttgtagagtagattcactacactcatcagaatcaaagacaatttgtctaacttgtcgtttaatattctcagatatttgatcaatttgtttctttaaagatgctattgaaaataccactaaagcataaagattaaatatattctgactttgatttttatattttccaatttcaattttcaaatcttcaagtcgttcgatctgctgatgataatatgcatcttctaattgcttttgccagatcaaatttttgtgagcaagatcattttcactatcttcattttctattcgctctaaaaatatagaagcttgcaatccatgttgctttaacaaatcaattaaatcctgagtctgaatatcatttaatccacgttcaatttttgaatagtaagatgttgataacacatcccccgccatttcagtttgtgataatttcatactttttcttgtttgttttaatgcttcaccaattgtcatatctttccctccctcgtattatcatatttttcattattgtataatgttttgttaattttgcaatagtttgtaaaacaaaagcattatttttatttttcaatcttttatgtttacaaatgtaaacttagcgagtagaataaaaaatgtgaagagatgaaaataaattatttaatttggaggttacggtcatggatgtaactaaaatcattatccttgttgtcgcaatcgccttgatcggctttatcctttggtggttcttcggcaaacatgacgaagctatcggtaaagcaagtgttaatcaaggcacacaagaagctaacatcgtcgttaacggcggttactctccttctaccattgttttaaaacaaggcgtaccagctaaggtgaattttgatatgcaagactctaccgcctgtttatctcatgtcgtctttgaacaacttggcgttgacaaagatttaactaagcaaaaagttactacagttgatattccgactgataagaaaggtacatataattttgcctgcgggatggatatgttccacggtaaagtcattgttaaataaggagtttacaaaatgagtattttttcaaagaatcaaactaaaaaagttgttgttaatgcagaaaatcatggttataaaccaaacacagttactttcaagcaaggtaaaccagctcaattaaagtttattccatcagataatatgggctgcatgaatgaagtagtctctaaagatttaaattttgaccaaaaattagatggtaaaaaagaagttacgattgacattccaactgacaagccaggtacttacacctacgcttgtggaatggatatgttccgcggaaaggttgttgttaaataatgaaactttcaaacattaagcgcttctggatctcatttattctagctattccaatgctaatccagatgttcgccatgccctttcactggatgatgccaggctataattggatcgcttttatcacgactacaatcattatggcgatttccgctgccccttactggagcagtgcttgggccgcttttaaacaccataacgctaatatgaacacattagtagccgtcggtacttctgtagcttacttttacagtatctttgctatgtttactggacgtgaagtctactttgaaagtgctgctttcgtcaccgtcttcgttttgctcggggatgcaatggaagaaaagatgcacaataatgcctcgaatgctttagctaaactaattgatctgcaagctaaagatgctgaagttgaacgtgatggcaaattcattaagttgccactagatcaagttaaagttggtgacatcattcgcgttaagcctggtgaaaaagtccctgtagatggcgtgattgttgacggttcatcgactcttgatgaatcaatggttacgggtgaaagtatgccagttactaagaaaaaaggcgacgatgttgttggctcaaccatcaatactaatgggacttttaccttcaaagcaactaaggtcggtagtgacacgatgctttcgcagattgttgatttagttaaaaaagctcaaaccagccatgcgccgattcaaaacctaactgataaaatatctaatatctttgtcccagtcgttttaattattgcaattattaccttcgtaatttggtatgttttcttaggcgcaacattggttaatgctatgctcttcgccgtttcagtagtcgtaattgcttgtccatgtgcactaggtttagcgacaccaactgctttaatggttggtactgcccgtagcgctaaaatgggcgttttaatcaagaacggtgaagttcttgaagaagttagcgacattgataccgttgtgtttgataagactggtacaattaccgttggtaagccacaagttactaatgttgtaggtgataaaaacaaggtcttaactattgcagctagtttggaagaaaattctgagcacccactagcaaccgctgtagttaaagctgctaaagaagcaaagactgaaattaagtctatacaaaactttgcagctattgaaggccgcggagttaaggcaaactatggcaatcaagaagcttttgttggtagcgatcgtttattagaagatatttctatttcccaggaaatgaaagatcaggctctccaacttcaaaaagaagcaaaaactgtagtctatgttggcctaggtaatgacatcattggcttaattgccattcaagatgtacctaaagcaagttctaagcaagcaattgcggaacttaaaaagcgtggtttaaagacggtgatgcttaccggtgacaatcaaaatgttgctgaagctattggccgtgaagtcggaatcgaccaagtaatcgccggtgttttaccaactgaaaaagccgctgagattaagaaattgcaggatgaaggcaataaagtagcctttgttggtgatggtattaacgacgcacctgcactgtctacagctgatgtcggcatcgccatgggatcaggtaccgatattgctattgaatctggtggcattgttctcgttcaaaatgacttaatgggcgtagttagagcgcttgagatctctaagaagactttcaacagaatcaaattaaacctcttctgggctcttatttacaacactattggtattccaattgcagcaggtttattcatggcctttggtctgcagcttagtcctgaacttgcaggtttagctatggccttctcttctgtttctgttgtaactagttcacttttattgaataaaacaaaaattgctggtgaaacagctcaagtttcaaagtaaaataattctccgaccggatattttaatccggttttctttttgtaaatttttcaatttgcgacttaaagtttcagcagtaatacccaaatatgatgctaagtctttcttttttaactttaattccacatttttactcccctgtttttgagctaagtcttgcaaataggccattaagcgttcctgagcatccattgaattgcgccgaatagagttagtttcgattgtaaccagctgctcgccaaaattattaagcaaattcaatgctaaatctggcgtctttttcaataacttttgaaaatcacgacgctcaatagaacaaacataagtatcttgtaaagcctgcacaaagttttcctgggcatgttcttgaaaaagattctgctgtccattagcatcgccttgattcagcacacctaatacggtctctttaccgtcttcgttgagattgtaaatcttggcactgccttgatccataaaaagcattccgttcttaccatcacctggttgtcgaataatactgccttttggaaaatattcttggtgcgttgaaattggtactagtttttctaacatttcatttggcaaatttttaaatatggctgctttgcgaatacaagccatgggtgaatgttgcataaaagcctcatttcttgatctaagtcaatttatttttatctgcatcttaatacaatgtatttaacaactcaagcagaaaggaaatattaatcatgactaaatacatcgcacatattgagcctttaaacgctaaaaaaattggtaccaaggcacacggtactgccacttttgaaaaaaaaggtgatcaactacatattcacgttgagatgtttgatactccagcaaatattgaacactgggaacatttccatggcttcccgaatggtcaaaaagctcatgtaccaactgcagctcaagacgttaaccatgatggctttattgatttaccagaaactgagccggtctcaggaactacaatggtgccacttgatgatgccccagaaaacatgaatattcctcatgatggttatcctgttgccgacagtaatggacattatgaatatgagattgatgtctcattaacaaagctacaaaagaaattcaaagctgcctttggtagcgataaactacaactagacaagcgtgtagtttacgttcatggtgtacctgcagatctggaattacctgatactgtaggtggttgcgtaatgagttatgatgcccatactaccttgccaatcgcagctggtgaaattgaaaaagcttaagttaaaagccattccttgtgaatggctttttgcatcctttcttattttttgatagcatagatatagattatgtaaaatatctaagaaaaggagatgttttataagtaggcttagatcctactcttatggagaataacgaaaaaattatccaagaaaagaaacgcgaaaaatttattaaaactaaaaagaattacaagcgtgcaccactaatgtcagttcacttaagagtgatgatggccgttatcttaggtcaaatcgcctgtggctattccctgggaattagtggtaccgctctttctaatgcagctaaatatatcaacattagtgacttctggactggattaattggggctggtgctttaattggccttgctggtagtcttttggtcggtcgactttcggataaaatcggtcgccgtaaactcttaatgtggaatatgtatatattagctgcttttttctacccaaagtcaagtattatcaatgatttaagaaaataaatttacttgttttaatgatgcgaataaggttaaagcaaataagagtttaaatttaagaaaaagcgaaagtaccacaaataagcctatgaatacttgtagtttttccataggttgcttatacttaagttgattatttgatttcagctaaagtcttttattttcggtggctatgttgtaatcatataattgatcatgtttgataagagcaaacattgtgcgtatcagtttatggactgatgcaatggcgattttcttatagccttgtctatttgaagatcgttttttcttgtcataataatcagttatatggcaaggctgcgtagcctttaccgtctccatttgagtaataactcgataaagtatttttctggcaatatgattgccatgcttggtaatgccaagagaactgtctttttcaccagattggtaccttcctggatcaatgccaacaaacgcatcaatttgagctgaagtgctaaaccgtcttagatcaccaagctctgctactaatctcactgctgtaattctagcaacccctgggatactcaaatagatggataaagcacgagcgtttactgctttagccagcttttccatgtagttaattacatagtcgcgttcttgctggagtgaaaataaattagaaatgttcctttgaatagctctaacgataatactatctttggaatcataaggataagcttctctagcaaaagcgtataatcttgtggttaagtaccgtgccctttgttgtcctattccagaaatagaattaagcatttgagttacctgtgtctcattcttttctagaacatatccagcatgtgggaaaagactaacaagcgcccaataaattctgccagatggatgagacagtatttcttcaatttgtgggaaagtggattggaggttgcggtgcaattgatttttagtagtaactatactcctagtaagttcttcataatagcgactggcattctgaagttcatgatactctctgggctgtggatcacgcagcttttgcggggcattaaattgaattaaagccaggcgataagcatctaccttatcagttttattatggcgtaaattattgtccattagctttttcgctttaagcggattaagcttcaaatacttaatatgataatcctctaagaaagcttgcaggcttagagaataaacaccagtagcttcgaaaacaactaaaggagttatcaaatattggttcagttgctcataaagtttttgatagccaaaggaatcattagagattctaaaagattcgccttgtttgatccggtcattaaccacacaaactgtggaagatttactgctaacatcaataccgaaaataatttgtgattccataatataacctccgctgtgaagataaacctctttatcaacctattaattctaattttctaaacacggcatctaagtgcccacagacttcgaagagacttaagaataggtggtaaagcagtccgtttcttttacgacatcaagtgtctaaaaagctgaagacttgatttgctttatcttcactttctattttagacaaaataaaaagtgccagatcgtgaatccgtcgattcatgatccaacactaggttagtatgtttctttattacatctaataaccgctaattttagcttaacctttatcctccgtattggaattggtttaatgattgctgttgactatactgtagggaatgccttgttaaccgaatggctacctaagggcgaagacagcaaacgccagagtcatttattaatctattggacaattggttttattttgtcctatctagctggtagttttatcactggatttgatagttatacttggcaaataatcttagcaacaagtgcagtacctgcactagtaactgctatcttcagaagtcttttcccactccctgcttcaccaggctggctagcaagtaagggtaagattaagacggccaacaaggtcattcgtaagcacatgggacgcaaatggagattacctgcccgctttatgaagcggaataaaaagaaaacgcctagaaatatttcctgggcaattttattttccaagcaatatctgcgacgtactctagtaggtgggattttctatgcctgccaagccttctcatttttcggtattagtatcttcttgccaattttattacaaagcatgaatatcactagtggaaatatctcaggaattatctacaatggtgggatgttcattggtgtgctaatcggtacctggatctttaacaaggttagccgccgcttctatcttatcagtaattttctaatctcaggtctgctaatcggcattttagcaatagtacctaacttaaattcaatacttaaattaggtatttttacgttatttgcgattattttatcagctggtttgatcctagattatccttatccgactgaattatttgatctgaaggtacgagcaactggtgtaggtacttgtattacaatcagccgaatcggggctgccgcagggactttcttattgcccgtcttaactaatgtgggtggtgctagcctggcaatgctagtttgtgcgattgttttactctttgcctttatcgtttgcctcatctgggcaccagagacctcaccccaatttatgaaaaaataaaataattaatatgctacacaaaaagacagattacatatgatgcaatctgtcttttcttatttcttatcttttttcttcttgtccttagaatccttatttaataattcttctggatccttatgcttaggcgtcttctttggatctggtacagttgcaaagcgatcaagcatcttctgtaagttattagggttgtcaaaagttaatcccataaaacatcttcctttcgttttctcaattatattaaaatttcaattcaaatgacaataattttaacccttattatcaataaattgttgcatcttaatcatttctgaaccagccagatcaacactaattaaatcactataatcatgaacactagtatctcctaaaccatattcagttacaatttttaggtcgaagccactatcagagcgatcttcaattaagcctaaacgatcaggataatgataaattgaatcactaattttcactatttgatcttcgggccaattatcaataatttctgctggtgactgaatttcatcccgtaatttaactgaacgctccagcctgtccggatcaaaactaccattatttttttgccattgaactaaaaaattaaagaagagcaagcgctcggaatcttcagtaatatgcgttatatggctcctagcaatcactgcaattgattcaacctgccctaactcattgatgctctcgaataccagattatcatcgtcatacttgagtactttaccaatagcaaaactaccatattgatcatcaaaggtataatcaaaataaatttcaaccagatccaagtcgttagtgaattcttgcttctgtgattgccgcaaatattgggtaaataagcgattatcaatggcattagtatcgacacaaacaatatcgtcaagtggtataacggtggcataatgctctaaagttaattcattgcgttctaaaatacgcacctcttgctgatcaagttgagtaattaagccagtgtaagtagcacctgtattcacctcaaaagttgtaaagggttgcgtgtcagctacgttaatcagtaaatcatgcagattagtaaaatcccaggctaacactgtcttatttaattgctctaagttaaatgaatccttaacttgggtaatcatataatagcgtagattaggcgtatcgtcttcaatcttagctacttgatcttctttaataaagactattccacctaaattaccgccttgatcgactgattcaaaggtaatccagccatgatgttgcgtgataatgcggccaatatagtaagaatttgcatcaactaccgtaatacttgcatccccatctaagttatatttttcttgatcagccttaagcgtgatttgtacaagtttattcaatttttcgccccctcttttttcttccgtgaatttaattgtcgcctaatcattatttttctgcaagaaaaaagaagatggtttagccatcttctaatattgagttaattctgtagaattttggggctaacgaatattacttcttttgtgcagctgcctcagcttctgctgctgtgtttgaaggggttaacgaagtactgtttggatcaaaacgcacatcgcttgcttttacataaccatcagcaaattggacttcaccttgattactatagacagatttaccaactaagtgataaaacagttctgccttattttcacttggtacccagatgtaaagcaacttatttaccttgtatcttccaccttgttttctaacttgatcgcccttgaagtcaatcttgtttccgttagcatcatagatatcagttggcttaataaattgaattagtgattttttagtatgataataattttgaactggaatatctttagcagctttaacattgaaattataaatccaataatcagttcccttaatatgatagattgctaattcgttgtcatcgtcaccatctctaccagtatcagcacgtgtcccttgctctaaacgatccactgtaaacttatcaccttgttttgcgtattttcctgaaggctgaactgcatctttatcaggtacttcaacaaaaagagcagcacgtttatcagttacagtaacagtcgtttcttctgatttagttgtttgagacgaagaagaactagtgttgttatttgtattaacactaattacaggacctaaattataagacttaatgtactgtttattaggtccacctattctaaagtaatgctttccgttcttaaatttgtatgaaccgccataagtcgtgatagtttcacccttatacaatttccaacggttattgtaagaggttctgccagttgaggtacgataaatgtaagtattatgagtaatcttacgtgttacaccatcaatgttggtagcctttatgtattgatccttgccgcttactttatagtaaagcgagccgtcaatttttacagggttgctttcaacagtgacatattgataggcattgtattttacacctgtgctgttaccatccttgtcgtaagctaaagcagtatgcataactgctttagtcgtagcagcttgtacttcattagttgtattagtcaaaacagccaagggtgcaactgtcattaatgtagctgcagaaattaatgcaatcttatttttcttcatcataatcatccttttcaaatctctacactgctattatattctctaaagctaattaaagcattaaaaagaagcccattaagtgaagtggacttctacttttgatattttcttttaatttattttttcaatgccgttgcctcagcttctgctgctgtgtttgaaggggttaatgtcaaacctatattaacaaatttaacatcactagctttaacataggcatcattaccgacttcaatttgatcaacgttacctgtagcatagaacttagtaccaactaaatggtagaataattctgccttgttttcacttggtacccaaatgtatatgagtttatctactttcagatttccaccttgttttacaatttttgcgccattgtggttttgcatagtaccgtcagcattatacacatcagtatccttgacaaatttgatatagccataatgttcgtgatcataatcatgctttactaattttttatcggcagttacatcaatagctaaaagccaattgtctgtaccttttattctatacattccagcttgtgctgcagttgatggaaaatgatcagcaaacggagtaacttctagtttatctacaataaacttcgtaccagctttgagattctttttgattgctttaccttgattatcataaatatttacaccgtaagcattttttacggtaacagttgcttcctcggcattagtattagtagcgttgtttgattcattgctggttaaatttgatgcagtattagtactaataactgggcctaaattatatgatctaatatattgcttacgtggcccacctactctaaagtaacgtttaccgtttttaaatttatatgatccaccatatgtagttacggtttcacctttataaaatttccatttcttactgttggcagtcataccataaggtgtcctttgagtagaagtccggtatatataagcattatgagtaatctttcgggttacaccatcaatattagttactttgatatattcatctttatctgtaactttgtaatattgacttccattgatagttactagttttggatctacatgaacactaccataaacgtaatatttatgaccggtactatttccatctttatcataagctaatgcgttgtgcataatagtcttggttattgaagaatctgcttgtactgtatgagcgctagttgtagtactcaggataggtgccgttcccattaaagctactacagaaattaacatgattttattttttctcattattaaccaccctttgaaaatctctatacttcaattatcttactttgtataaacttagacaacaaaaatagcatcaaatcatattgatttgatgctattaaggctaaaatttacaaatttagtcccaagctaattcataaaccttatttgaaacagttttatttttaccgttaacattagcatggtatgcaacagttaagtaaccgtgattttcatcaataatttggatactttcaacttcactatgttcatctgaaatatctaatccaccaaatgcacttaagtttacattttcccattgagattgatcattacgtgcataaaacggaatttttacaatttccttgtgatagtatgaccatgaaccattacttaaacttggtgatttttgactagtaatataaatattaccagaattatcaagatcataaccttgtacagagtttaaaacagatccatacaaaccatatactgtaaaactagtttcacattgataatttcccatatttacgaaaccattatttccagcctcatctaatgcattattaatgacatttaggtcataaattgaaaagtggcctgttccattattctcaatagtagcaattaaaagcatactataatctggtgaaactgctacttcagcgcgttccatttcatcaccagagcattgatcttcaggattacctgcgcggttcaagtatgctaaacgtgggaattcagtatttgatgaagcatatgatttgtatctaatatctgctcgagcaatttgagaagcccatttattcttgtttttagtaccaacgaaccatttaccagatctacctgaatattcccaagtttgggtgtgtccagctgctgcacctactaaagtaagcacaggggttgtcacgttgccacggaagccacgcaatacatgtgtttctgtctggttatttcttaactgtaaaccataaacatactttgatcctacattacctttttgaactacagctctgtaacctgtattcatatcgaatctatctaaaattctaatatttgttgcatctaacataataaaacctccgaaaaatttaaaaactactacttatcctgagtttgctcattcatctgtttagccacttccgcaaagatgtcctgcacttcttgcctgttcagcttgaagccttttgcttcaaggctgttcactactgcgttgccaacacggttaatcttctgttcgtcagaaagattttctttgtcgtataagcgtacatagcttttcattaagctatctgcagtattgcggaattgctctaagcgtttattcttgaaatgaactctgctcaagatgccaatacctactacgctaattacccataacgccagagtaatcagctcaacgtaatcatgaatatccataattgaatgaatcacctctcttttgatcaaacgatccaagggggctaacgaatgtccattggacttcacctctgtttgataatgttcaacaagacactaatacacttgatttatattagtttttagactaatataaatgtataagaaataaccgaaagctggtaaatgttccgccaagaattttattaacttaggttgttttctttttcatatctcgttgacaatatttactataagttaattaactaattatgtcaataaaaaaagctaaaaaactattattttttcgaacaagtattcttgaaaggcttggtatgattgagttagagcgcacaaaagaattagcaaaaaaatacaaaatgaatctccgtgaagtaaatgacaaggcaggtttaggtagaaattccatctataattggaagaatcaaagaccaggaattgatgcacttaatgcagtcgcagatgtactacatacgtcagccgattatttaagtggtaagacaaacaatcctagcccgtcacctaaaggtgatgaaactggtggtatttctattgatggtgaagtaccatatttctatcatggctacactattccagaagactacctgaacatagttcgtcaacttatggaacgtgatatcaaaaaaggacttattaaacgacatgacaacagcagatcagaataaacaagaactcatagactggttattagcctatgctaaaaaacgtgatattatggttgaattagttgaagtaaatccaacttacccatccatttctttaaagaactatagattcgctgtcattaatactaattggcatcatcaagaagaagtaccattttcaataggtcatgagattggtcacattatgctgactaatggtgaagtagattctcgtcaatatatcacttttacagaacagaattccgaagaaagtccagcagacatcttttcaataaagctaatctataattactcctgcaaaatgggtgattgcttcgaagatacaggtttatttatgcaagcatacgggataccaaatcgagtagctgatgcaactaaagagatatttaagcgagcagcttaaccatcaacttctatattgatttgattactaaaagttttagcattagtttttacactacttaaaatccaattaaacaaaaaatcgctactcaattgagtaacgattttttctatccatccagttcaacgccttgcaagtccttcatcttgctataaaccgcgccacgttgacttgaatcaaactccagaataagcatatctccgccgcgaattacggtttgaccatttggtatgatctcatctccatcgcggtgaattgttcttaccctagtatcaaccggccattgaacctcagaaatggttttatcaaccagtctactgctctcatagaccggcagagccattgtatcagcctgaccagtatagttagccttatggtcactactcttgtccatagcggctgctagaagcccgtagataggcttaccgccaagaagttcatcaactaataacgcaatgaaggccaccacagctaatggcatcaagtgaagtaaggaccctaccatctcagtaattaagataatcgccgtaaatggtgcacgaatgattgctgcaaaatatcctgccattgaaaaaatcactaggttaactactaaacgctgcggtaacaagcctaactgtaccatcatcagtccataagttgcaccaatcaaagcgcccattgtcaaaattggcaggaagataccactaggaagacctgaatcataagcaacaatggagaaaacaattctcatgacataatagaaggctagcatccctacaatgccccaacctgttttagtgattatattcggcaatgccagaattaaccgattacctggaccggtgattaatggccaaaagtaagcaatcgggattaatattgccaaaggaataagtccatgcagccaacgaggtaaaatggtgattttagcatagaccttctttaaactaaataaaccaactttatataaatgacccaataagcctaataaaatccctaagataagcaagtgccagtacaacgaaatcggaaatgaatagttatattgaattgctagggcgtgacgaatgccaaacaagtttgaaacgacaaagtttgaagcaattgcgccagctaaagcattcatccaaactaatggtgaaaagttatggaatacttcttctaagacaaacaaggcaccactcaaaggagcgccaaaagcggcagacaaaccacttgaagcccctgttgcaagcagaattctagtttttaatttgttctgcttgcatccctgagcaacaccttgaccaattgtcgagcccagctgcaatgatggtccttctggtcctaggaatagccctgtgccgataaccaagataccaccgattaatttccgccataaaattggaaaccattgtagtgatagcttcccttgcagttgcaattttacttctggaataccagaaccaccaacatggggatattgtttaacaaaataaccagcaattaccgctaccgcaataaagccaatgataatcgcaataaaccacaacggattctggtgcgctaattgaaacaagtataaccaaaaaccagatgtcttttcgattccaaatctaaataaaccaactactacgccagtacatattccgacaagtagtgcttggagcaacagtttaatattagttctgtttgcctcgtctttcattactttctccctcacaataaaaaaaacgtgtcacaaactattgtacaacaaaaagccagctagaaatgttctaactgacttttttgtttcatgtgaaactaattatttttcttcataccattcggtgtggaagacgccttcacgatcatttctaaggtaagtgtgcgcaccgaagtagtcacgttggccttggatcatattagctggcaagtttggattaaagattgattccaaccagttaagagctgcgctcaaagttggagttggcacaccacacttagtagcaaattcaactgacttacgcaaagctggcaagttttccttcatcaaaccgcggaaataatcgtcttggaataggttcattagcttgccgttcttgtcataggctttttcaatatccttaagcattgcggaacgaatgatacaacctgcttcccaatcttgagcaattgacttgtatcttaagtcccaatcataagcttcagcagccattgtcaattgttggaaaccttgagcataggcaacagcttgggctaattgcaatgatttttcgaatacgtcaaccatatcatcaggaatttcaccattgtattcaaacttagttggtttaacgcccttttcaattgtcaagtgtgcttgcttactcatgaaacgtgccattacagcctcggctaccaccgttacaggagcgccaagtgcaacaccatcttcgagcatccagttaccagtacctttgtatgaagcaacgttcaaaatgtgatcgattacgtgatctggcgttaaatcatctttttgtgccaaaacctttgaagtgatttcgctaagatatgcttctaccttaccatgattccatttatcaaaaatttctgacatttcatcatcgctcttgtgagcaacgtcacggagtaagttgtaaacttctgaaaattcctgcataataccgtattcgataccattgtgcaccattttgacatagtgaccagcaccttcaggtcccatgtagtagacacatggcttgccttcagtattcttagcggcaatagcttcaagaattggagcaacttccttataggctggttcatcaccacctggcatcaaagctggaccattcaaggcaccctcttcaccaccggaaacacccataccaataaaatgaatgccgtgcttttccatttcgtggaaacgacggttagtatcgtgataatttgagttaccaccatcgattaaaatatcgcctttatccaaaagcggcagcaatttttgcaaagtttggtccactggatcgcctgccataatttgaatcaaaatcttgcgtggcttttcaagtgagtttacgaactcttcccaggtgtagcaaggctttaatttatcatcttcatattttgcgaaagcatcaacttctggtttgtcgattgagaaaccggaaacggagaagccgtggtttctaacattcaaagcaaggttcttgcccataacagacaaaccgataacgccgaattgttgcatgtttattaattcctccattaatcaaagttcatcaagtattattatacgttctagcacgcaaaaaagcgaaaccaaaaggttccgctttttaaaatctagttaataatttttttgttattgggtaaaggtgtttcacacactgctcggtaatatttcctaggaaatattacttttattgatcaataccccaaagtaaaatgttaaatgctaatggtaatgttagcttggtaatgtatccatcctttttagcctgttttaaagatgctagaacaaatttacgttgttgacccgttagctttttggctactttaacagctaaattaaagtcatactcgttttttctaatagcatttttgataactatctttgcccacagaaataggttgagaatcggagtttacagttacaatgtagctccacttgctaagtcgaggaatatttttaattgttatagctttatcaaacttagctactgcagttgaattgctgttgtctgcagcgttggcagtgacagacgatgctgaaaataatgctgcaagtaaagcagtagcaagtaaactaattagagcttttttagatttcataatttagcatctttttacacatagtgcttattggctaataagcattaattcatatccaacactgtctattataagcatctgtattctatttactagccaacaaactattttatatttaaaatcgtatataaaatgaggctatttcccaggaaatattttcccatacaaaaaaagcgggacaaacgtctcgcttctttataattactcaaccaaattagtgttgtgaagcacctgaaaccgtatcaggagcaggatcctcttctggttctgattcttcatgttgagatgcacctgttgcagcgtcagcttctaagccgtacttttctgcaaagtaactgaatggcttcaagtcttcagcttgatacttcttgacaaaggctgggtcgtcaagtgagttcaactcagttgagtaaggcatttcgtgagtgtacttgacgtcgatcaacattggaccgtccatcttcttgaattcgtcgacagcatcttcgaattccttcttggtgcgaaccgttacacccttaacattcataccttcagcaacctttgcccagtcgttatcagggataataacaccagataatggttggtgagattcatcttcttgttctgcttgaatgtaacctagtgtttcgttagtaaatacaatattcaaaacatgcatgttgtaacgagccatagtaagaagttcttggttcatcatagcaaaaccaccgtcaccagctaattgccatacttcacggtctgggtaaacagttgctgcagtaagagcagctggagcaccataacccatagttgcgtgcaagcctgaagtagtccacttttgatcatcatgcaagttcaaaagacggcatgagtcaacgttaacgttaccaacatcaatagcaaagatggcgttgtcatcagccttcttgttgataacatcccagattggttcaggacgtacaggcatttcatctgagttcttaaagcttgcttgccatgcatcccagttctcacggtctgcaatagcagccttgtaaagtggtgattcgctacgttcttcaccagcgtcaataattgctctcaaagccttcttagcatctgcaagcattgaaacatcagttgagtgacgcttaccaaacttagctgaatcaacatcaatttggataaccttagcgttcttagggaaccataaaactgagaatggtgagttgttacctacccaaacaactaagtcagttgcgctttggacttcttgagcagccttaggtccgatacggccgatagtacccatgtatgctgggaatttgtcttctactacacccttgcctaagtatgatgacataataggggtcttgaacttttcagcaaattccttaacttcttcaccagcatcctttgcacctaaaccaatgtacatggttgggttcttagcttctttcaaaagcttaacagcttcttcaactgaagccttagttggtgctggataattgtctgctggatgagcatccttgtttacacggaaggtgtcatcaatcttttgccaaccgtagtccttaggaataatgataactgcaggaccctttcttgcgtaggcttgacggatagcttcatcagttaaaattggaatttgttcagcggtcttagcttggcggcaccaaacactagcgttcaagaaccacttgtcttcatcaaaagcttggaagaagtcaatatcttgacggctagttggaacgttagcaacaattgctaccattggagtcttgtcaaacttagcatcatacaaaccattgaataagtgggcagcaccaggaccagctgaaccgaaacatacacccaacttaccagttaacttatattctgcagaagcagctaaagcaccagcttcttcgtgacgtacttcaataaatttcatcttatctctaaagtcatagatagcgttcatacttgagtcgaatgaaccacctgggaaaccgtagatatgatcaattccccaatcgtaaataactttaagcattgcatcagaaccattaatttttgtcatataagtgcatctccttaacttttgttctttcataatgtattaaaacactttttttcacatttgcaaaccgataaaatcaccgttattacgcaaatgaaaacgcttttgtaataataatcacttcacaagctttaccaaattcaatatctcaaaaagctgaatggtagcgttttatattgtgatttgatgaacattattatactaaatttcacttattttatgtatattcattgttacttatagtaaaaatttaagaaaaaattttttacaatttatttcatagctatccaatttagaaaaacgttattttataattttgcgcataaaaataacgtagaatactattcctacgctatttttgtgctattctactttttcactctagagtaacgcccattttgaatgtaaacactcaagattgccaagtcagctgggttaactcctgaaattcgttctgcttgagctaaagtttcaggacgaattttttcaaatttttgccgtgcctcagtagctaaaccttcgatttggtcataatcaatatctgctgggatttttttggcttcttgtctctttaagcgagcaattctggtttcttctttcttgatatagccagcatacttgataccaatctcaacttgttctttaacgtaacgatcgcctggaactttttcaccagttaaccgttcaatatcagcaatagtaacattagggcgacgcaagaaaacatcggccttaacaccggccttcattggttcctgaccaatactttgcaaaaattcctgcacctcatcagttaaatgaaccgtaatttcatgcagtctcgtctttgcatcttcaatcgcatgcttcttttcttcaaatcgtgcgaagcgttcgtcagaaattaagcccagatcatgaccatattcagtcaaacgcaagtctgcgttatcattgcgtaaaatcaaacgatattctgctctactagtaagtagacgatatggttcattcgtccctttggttaccaagtcatcgattaacacgccaatgtaagcatcgttacggcctaaggtaaatcctggcttatcttgagcagataatgccgcattaattcctgcaattaaaccttgaccagctgcttcttcataacctgatgttccattcatctggcctgcagtaaataaatgctttacgtttttggtttccaaagtatgcttcaattgccatggttcaaccacatcgtattcaattgcatatcctggtcgcatcatttccgcatgttctaatcccgcaacagaatgaatcatctttaattgaatttcttctggcattgaagttgaaaagtcgcctacataaacttccttggtagtctttccttctggttcaaggaaaatttggtggcgatccttatctgcaaagcggacaactttgtcttcaattgaaggacaataacgtgggcctacacccttgataattccagagaacatcggtgcacggtcaagattgtttctaataatcgtgtgtgtggttggattagtataagtcatccaacaagaaatttgtttttgtaaataatcttcatcacgactttcatatgaaaagtgccgtgggattttatcaccaggttcttcctcagttttagaatagtcaattgtattgccgttaacacgtggaggagtaccggttttaaaacgacgcagcttaaaacctaacttttctagattttccgacagcttaattgaaggagtagtgttatttggacctgaagaataagtcaattccccaataataattttaccgcgagccgctgtacctgtagtcaaaacaacgcttttagcatgatacttcgcaccagtattggtaatcacacctttgcagacgccatcttcaactaccaattcatccacgatagcctgacgcaaggtcaagttgggcgtattttcgatcgtatccttcatgtgttcatgatattgccacttatcagcttgagcacgtagcgcacgcacagctggccccttacccgtatttaacatccgcatttggatataggtagcatcaatgttctttcccatttgaccacctaaagcatcaatctcacggacaactgtccctttagctggtccaccaacagatggattacatggcataaaggccaccatatccaaaccaatcgtaaccagcaaagttttttgtcccatgtgggcacttgccaacgcagcttcacatccagcatgcccagcaccgacaacgattacatcatattcatttgaatcatatgttttaaccattttcatcctactttcctaaacagaattgactaaataattgcgtgattaattcatctggggcactttcaccagtgatttcacctaaagtatcccaagcaccagtaaaatcaatttgtgcaatatcaacagggacgccatcttcaactgcttgaattacatcttccaattctttcttagccttatgcaataaggaagcttggcgttgattggttaccataatttgatcattagaattttcaatcccagcaaaaaatagcttattaatcaattcttcaagcgcatctaagttttgttctttcaaaatcgaagttgaaataacatcactacccgttagtttctccatctcagtagttgttattttttgacctaaatccgacttatttaagatcacgattcgcttcttgtcctttgttgcttcaattaaggcttgatcttcagctgttaatgcttgactagcatcgattaacaacaagaccagatctgctcgctccaaggccttttttgatctttctacaccaattttttccaccttatcttcagtgtggtggattccagcagtatcaattagctctagcggtactccttttacagacacatattcttctaacgtatcacgcgttgttccagccacatcggtcacaatcgctttgtcgctttgagtcagataattcaataaagaagactttcccacattaggacgaccaacaattgcagtagccaaaccattgcgcaagatttttccttcttgtgctgtcttcaataagcgattaattttatcaattactgatctagatgtgtctgccatctgttttgcggtaacagtatctgcatcatactctggataatcgatattaacctcaacgttagccaaagtattcagaatttcctgccgcattgcctgaatcttgtgtaacaatccaccagctaattgaccaacagccacttgtcgtgccttatccgtcttggcccgaacgatatccatcacactctcagcttgagttaagtcaattcgtccgttcacaaaagcacgtttagtaaattcaccaggatcagccattcgcgcaccgtgactcagcaacaattgtaaaatatgattagttaccacgattccgccatggcaattgatttctacaatatcttcacgtgtaaaggtcttgggcgcacgcagcactgtcaccattgcttcatcaatcgttttcccagtatccggatcgataatatgaccatagtgaatagtatgtgtcggcaccttgcttagatcttcgcctttaaaaacctcatcagcaatcttaattgcatcctcaccagacattcttacgattgaaattccgccttcaccgatgggggttgaaattgctgcaatagtatcgaactctgtcaaagtttgagccataattcttcccttttctcaataaaaaaagcgcattataccaccacgaataaccatgatggataaagcactttgactactttatctaaaaatcattttagactaatattcttttatttctttttgcgtcctaaacgcttgtaagcccttcttagtttacgtttgcgttcacgctcagcctcagcctttgcttcttgctctcttctatatttaatagggttttgcaagataaaggtttgaagcgcctggaacaagttggaaattacccagtaaagtgtaatagctgactggaagtttaaggccatcacaccaaccatgatagacattccgtacatcattactttggtcattccattttgcgatgattttggcgtcgataattgactaatatacgtcgataagaacgtaaagatcattgctaaaataggcatgatgtaatatggatcgggcttgcttaaatccatccataagaagcgcccagtttgtaactgcggtgtacgtaaaatcgcaccatacagtgcatacataactggcaactggatcaggacaggcaaacatccagtataaggatttacgcctgcttctttataaagcttgttagtttcttgttgtaataatgttcttgattcagtgtcacgtcctggatatttcttacgcaactcattaatttgtggttggatgctttgcatcttagtagtacttcgaattgaaatagcattcaaaggtactaagatgacacgaacaatgacggtgaagacaataattgcccagccataactgttccccattaacttagctagccacaaaataaaagctgacatgtaataaacgatccaacggtcccaccaattaccacttgtatgtgagattggcgttgcttgaccatttgctcccgtagtagcacatcctgtcaatacaacagcaagtattgctactgctaagactgcaagaagacgtttgacatttctcttggtcagaatgtccttcaatctatttttcctcaactttatctggcatttcttcaataatatgagctaacgataatgcgtgaagcaagtttttacgcacctgagccatattaaaatcgcgagcataaggtcgcgtaatgactaaaaaatcaacatgcggattaatctgcaatttttcttcatcaatcacggcccgaatataacgcttgagtcgattacgtgcgactgcggtatgaccaacctttttgcccacagaaattcctactcgaaagtgtttattttctgttttttctaccttataaatgacaaaagctcggttagcgactgagtcgccagattcgaaaacttgctggaaatctttttcagattttactcgataagactttctcaaaacgtttcattccactctagtagactaaaaaaaccactgggattcagtggtttaagcagataagacttttctaccttttgcacggcgtcttgctaaaaccttacggccatttgatgtgctcatacgcttcataaaaccgtgaacacgtgaacggtgacgcttcttaggttggtaagttctcttagttgtcatattaaactgcacctccataaatttttgtgccaattgcacaatttcttattaaggatagcacgaaaagccataaaaaccaagtattttaagaaaaaaagactcctgaattgtcaaattaagtgcaacagttaggctatgaaggaacgtattgcttgaagagttcttctgctgtgtgatattggaggattcgacgatgtttgcggttaatggcatcagttgcctgttgaacataagcagctgacttatctttcatgcttttgcccttagggaagaattgacgcagaagtccattgcagttctcatttgtgcctctttcccaaggagaatatggatgagcaaagtagatctgacatcctttgattttggtcatatccgcaaactcagaaccattgtcaaacgtaattgatttaaaccaattaggatgtctgtcaatctccttttgaagcagtctttgacaagtactggcccgatagtcaggaattttgataacaacctcaaaacgagtggttctttcagtcagtgtcattaaggcaggttgatttttacgtctgacgcctttaaccaaatcgccttcccagtgcaggggaacttttctgttttcaacttctttaggccgctgttcaatcgaattgccaagattctttttatgcggagcatggccaccatgactatgatggcgtttgtttctgcgtcttttaagcttcattggcaggtcgatattgcttatatccagcaatccttgatcaatataacgatagacagtgggcgtgctaggacatggataatttggcataatcctgtgaaattcaccaacgaattcatcaatgctggtggcatcaaatttggctttaaagcgtctgcttagcattctgaaaaagacggcatagtgttgcagtggattacacttatagcagtttctgcggcgcttttcatgataaatttgtgcagtatcagcgtaatagtgctcatacaagacatagctgctgtctctttgcaggacactgcctcgtctaatttcacggctgatagttgatttatgacagcctacttcttgagcgatagcattgcaggaggttatgccagaatcaagcagagcttgaatttgtccacgttgttcgctgttcaattgatgataatgcttggaaatgctagaatttgagttggtcatgaagatcttcctttcttgatttttggtcacttcaagtttaggtcttcatggcctttttgtttaacacttagtgttgcacttcaattttaaatccgggagaaaaaaagacttttaaatcccgtgaatattttctaaaaattgattgtttttcatgtggataaaaaataaaatatttttcttacgtataatttccacaagataattcccaacgttttccacaactcacatggtgttaaaaacttaattcacaccatgtggataacgcatatggtattttacctcaagtattgatagaatagtatccataattcacagctgtactgtgcataaattaacagttttgctcttatcatgtcaaaatgtacatatcactttaatagttatcaacaggctgtgtactttgttgatttctttttcacctgtggaaaaccagttaagtaaatggtaaaataaatttgctttttactaactgggggaatgtaca
